(19) United States
(12) Patent Application Publication
(10) Pub. No.: US 2021/0130800 A1
(43) Pub. Date: May 6, 2021

(54) SYSTEMS, METHODS, AND COMPOSITIONS FOR TARGETED NUCLEIC ACID EDITING

(71) Applicants: THE BROAD INSTITUTE, INC., Cambridge, MA (US); MASSACHUSETTS INSTITUTE OF TECHNOLOGY, Cambridge, MA (US); PRESIDENT AND FELLOWS OF HARVARD COLLEGE, Cambridge, MA (US)

(72) Inventors: Feng Zhang, Cambridge, MA (US); Jonathan Gootenberg, Cambridge, MA (US); David Benjamin Turitz Cox, Cambridge, MA (US); Omar Abudayyeh, Cambridge, MA (US); Ian Slaymaker, Cambridge, MA (US)

(73) Assignees: THE BROAD INSTITUTE, INC., Cambridge, MA (US); MASSACHUSETTS INSTITUTE OF TECHNOLOGY, Cambridge, MA (US); PRESIDENT AND FELLOWS OF HARVARD COLLEGE, Cambridge, MA (US)

(21) Appl. No.: 16/756,139

(22) PCT Filed: Oct. 23, 2018
(86) PCT No.: PCT/US18/57177

§ 371 Date: Apr. 15, 2020

Related U.S. Application Data
(60) Provisional application No. 62/576,061, filed on Oct. 23, 2017.

(51) Int. Cl. C12N 9/22; C12N 15/11; A61K 9/50; C12N 9/78; A61P 43/00

(52) U.S. Cl. CPC C12N 9/22; C12N 15/11; A61K 9/50; C12N 9/78; C12N 2320/32; C12Y 305/04005; A61P 43/00; C12N 2800/80; C12N 2310/20; C12Y 305/04004

(57) ABSTRACT

The present disclosure provides for systems, methods, and compositions for targeting and editing nucleic acids. In particular, the present disclosure provides non-naturally occurring or engineered RNA-targeting systems comprising a RNA-targeting Cas13 protein, at least one guide molecule, and at least one adenosine deaminase protein or catalytic domain thereof.

### CROSS-REFERENCE TO RELATED APPLICATIONS

[0001] This application claims the benefit of U.S. Provisional Application No. 62/576,061, filed Oct. 23, 2017. The entire contents of the above-identified application are hereby fully incorporated herein by reference.

### STATEMENT AS TO FEDERALLY SPONSORED RESEARCH

[0002] This invention was made with government support under Grant No. MH110049 awarded by the National Institutes of Health. The government has certain rights in the invention

### REFERENCE TO AN ELECTRONIC SEQUENCE LISTING

[0003] The contents of the electronic sequence listing (“BROD-2365_ST25.txt”; Size is 1,528,811 bytes and it was created on Oct. 22, 2018) is herein incorporated by reference in its entirety.

### TECHNICAL FIELD

[0004] The present disclosure generally relates to systems, methods, and compositions for targeting and editing nucleic acids, in particular for programmable deamination of adenine at a target locus of interest.

### BACKGROUND

[0005] Recent advances in genome sequencing techniques and analysis methods have significantly accelerated the ability to catalog and map genetic factors associated with a diverse range of biological functions and diseases. Precise genome targeting technologies are needed to enable systematic reverse engineering of causal genetic variations by allowing selective perturbation of individual genetic elements, as well as to advance synthetic biology, biotechnological, and medical applications. Although genome-editing techniques such as designer zinc fingers, transcription activator-like effectors (TALEs), or homing meganucleases are available for producing targeted genome perturbations, there remains a need for new genome engineering technologies that employ novel strategies and molecular mechanisms and are affordable, easy to set up, scalable, and amenable to targeting multiple positions within the eukaryotic genome. This would provide a major resource for new applications in genome engineering and biotechnology.

[0006] Programmable deamination of cytosine has been reported and may be used for correction of A→G and T→C point mutations. For example, Komor et al., Nature (2016) 533:420-424 reports targeted deamination of cytosine by APOBEC1 cytidine deaminase in a non-targeted DNA stranded displaced by the binding of a Cas9-guide RNA complex to a targeted DNA strand, which results in conversion of cytosine to uracil. See also Kim et al., Nature Biotechnology (2017) 35:371-376; Shimatani et al., Nature Biotechnology (2017) doi:10.1038/nbt.3833; Zong et al., Nature Biotechnology (2017) doi:10. 1038/nbt.3811; Yang Nature Communication (2016) doi:10.1038/ncomms13330.

### SUMMARY

[0007] The present application relates to modifying a target RNA sequence of interest. Using RNA-targeting rather than DNA targeting offers several advantages relevant for therapeutic development. First, there are substantial safety benefits to targeting RNA: there will be fewer off-target events because the available sequence space in the transcriptome is significantly smaller than the genome, and if an off-target event does occur, it will be transient and less likely to induce negative side effects. Second, RNA-targeting therapeutics will be more efficient because they are cell-type independent and not have to enter the nucleus, making them easier to deliver.

[0008] In one aspect, the present disclosure includes An engineered, non-naturally occurring system suitable for modifying post-translational modification sites on a protein encoded by a target RNA, comprising: (a) a catalytically inactive (dead) Cas13 protein, or a nucleotide sequence encoding said dead Cas13; (b) a nucleotide deaminase protein or catalytic domain thereof, or a nucleotide sequence encoding said nucleotide deaminase protein or catalytic domain thereof; (c) a guide molecule comprising a guide sequence designed to have a degree of complementarity with a target sequence at one or more codons that comprises an adenine or cytidine and encodes an amino acid that is post-translationally modified; wherein said nucleotide deaminase or catalytic domain thereof is covalently or non-covalently linked to said dead Cas13 protein or said guide molecule, or is adapted to link thereto after delivery.

[0009] In some embodiments, the guide sequence comprises a non-pairing nucleotide at a position corresponding to said adenosine or cytidine resulting in a mismatch in a RNA duplex formed. In some embodiments, the system a particle delivery system comprising a ribonucleoprotein complex comprising (a), (b), and (c) encapsulated within or otherwise attached to a delivery particle, the delivery particle further optionally comprising a tissue-specific, cell-specific and/or cell compartment-specific targeting molecule.

[0010] In some embodiments, where the system comprises a vector system comprising one or more vectors comprising: (i) a first regulatory element operably linked to a nucleotide sequence encoding said guide molecule which comprises said guide sequence; (ii) a second regulatory element operably linked to a nucleotide sequence encoding said dead Cas13 protein; and (iii) a nucleotide sequence encoding the nucleotide deaminase protein or catalytic domain thereof which is under control of said first or second regulatory element or operably linked to a third regulatory element; wherein if said nucleotide sequence encoding the nucleotide deaminase protein or catalytic domain thereof is operably linked to the third regulatory element, said nucleotide deaminase protein or catalytic domain thereof is adapted to link to said guide molecule or said Cas13 protein after expression; and wherein components (i), (ii) and (iii) are located on the same or different vectors of the system, optionally wherein said first, second, and/or third regulatory element is an inducible promoter.

[0011] In some embodiments, the nucleotide deaminase is an adenosine deaminase or a cytidine deaminase. In some embodiments, the nucleotide deaminase is an adenosine deaminase. In some embodiments, the adenosine deaminase protein or catalytic domain thereof is an RNA-specific adenosine deaminase and/or is a human, cephalopod, or Drosophila adenosine deaminase protein or catalytic domain thereof, preferably ADAR, optionally huADAR, optionally (hu)ADAR1 or (hu)ADAR2, preferably huADAR2 or catalytic domain thereof.

[0012] In some embodiments, the adenosine deaminase protein or catalytic domain thereof has been modified to comprise a mutation at E488, preferably E488Q, of the hADAR2-D amino acid sequence, or a corresponding position in a homologous ADAR protein and/or wherein said adenosine deaminase protein or catalytic domain thereof has been modified to comprise a mutation at T375, preferably T375G of the hADAR2-D amino acid sequence, or a corresponding position in a homologous ADAR protein; or wherein said adenosine deaminase protein or catalytic domain thereof has been modified to comprise a mutation at E1008, preferably E1008Q, of the hADAR1d amino acid sequence, or a corresponding position in a homologous ADAR protein; or wherein said adenosine deaminase protein or catalytic domain thereof has been modified to comprise one or more mutation as provided in any of FIGS. 43A-43D, 44, 45, 46A-46B, 47A-47B, or a corresponding mutation in an ADAR homologue or orthologue.

[0013] In some embodiments, the nucleotide deaminase is an cytidine deaminase. In some embodiments, the cytidine deaminase protein or catalytic domain thereof is a human, rat or lamprey cytidine deaminase protein or catalytic domain thereof. In some embodiments, the cytidine deaminase protein or catalytic domain thereof is an apolipoprotein B mRNA-editing complex (APOBEC) family deaminase, an activation-induced deaminase (AID), or a cytidine deaminase 1 (CDA1). In some embodiments, the cytidine deaminase protein or catalytic domain thereof is an APOBEC1 deaminase comprising one or more mutations corresponding to W90A, W90Y, R118A, H121R, H122R, R126A, R126E, or R132E in rat APOBEC1, or an APOBEC3G deaminase comprising one or more mutations corresponding to W285A, W285Y, R313A, D316R, D317R, R320A, R320E, or R326E in human APOBEC3G. In some embodiments, the cytidine deaminase protein or catalytic domain thereof is delivered together with a uracil glycosylase inhibitor (UGI), where said UGI is covalently linked to said cytidine deaminase protein or catalytic domain thereof and/or said catalytically inactive Cas13 protein.

[0014] In some embodiments, the Cas13 protein is Cas13a, Cas13b, or Cas13c, preferably wherein said Cas13 is a Cas13 listed in any of Tables 1, 2, 3, 4, or 6 or is from a bacterial species listed in any of Tables 1, 2, 3, 4, or 6, preferably wherein said Cas13 protein is Prevotella sp. P5-125 Cas13b, Porphyromonas gulae Cas13b, or Riemerella anatipestifer Cas13b; preferably Prevotella sp. P5-125 Cas13b. In some embodiments, the nucleotide deaminase protein or catalytic domain thereof is fused to N- or C-terminus of said dead Cas13 protein, optionally by a linker, preferably where said linker is (GGGGS)₃₋₁₁, GSG₅ or LEPGEKPYKCPECGKSFSQSGALTRHQRTHTR, or wherein said linker is an XTEN linker. In some embodiments, the nucleotide deaminase protein or catalytic domain thereof is linked to an adaptor protein and said guide molecule or said dead Cas13 protein comprises an aptamer sequence capable of binding to said adaptor protein, preferably wherein said adaptor sequence is selected from MS2, PP7, Qβ, F2, GA, fr, JP501, M12, R17, BZ13, JP34, JP500, KU1, M11, MX1, TW18, VK, SP, FI, ID2, NL95, TW19, AP205, ϕCb5, ϕCb8r, ϕCb12r, ϕCb23r, 7s and PRR1.

[0015] In some embodiments, the nucleotide deaminase protein or catalytic domain thereof is inserted into an internal loop of said dead Cas13 protein. In some embodiments, the Cas13 protein is a Cas13a protein and said Cas13a comprises one or more mutations in the two HEPN domains, particularly at positions R474 and R1046 of Cas13a protein originating from Leptotrichia wadei or amino acid positions corresponding thereto of a Cas13a ortholog, or wherein said Cas13 protein is a Cas13b protein and said Cas13b comprises a mutation in one or more of positions R116, H121, R1177, and H1182, preferably R116A, H121A, R1177A, and H1182A of Cas13b protein originating from Bergeyella zoohelcum ATCC 43767 or amino acid positions corresponding thereto of a Cas13b ortholog, or wherein said Cas13 protein is a Cas13b protein and said Cas13b comprises a mutation in one or more of positions R128, H133, R1053, and H1058, preferably H133 and H1058, preferably H133A and H1058A, of a Cas13b protein originating from Prevotella sp. P5-125 or amino acid positions corresponding thereto of a Cas13b ortholog.

[0016] In some embodiments, the guide sequence has a length of from about 20 to about 53 nucleotides (nt), preferably from about 25 to about 53 nt, more preferably from about 29 to about 53 nt, or from about 40 to about 50 nt capable of forming said RNA duplex with said target sequence. In some embodiments, the distance between said non-pairing C and the 5′ end of said guide sequence is from about 20 to about 30 nucleotides.

[0017] In some embodiments, the Cas13, preferably Cas13b, is truncated, preferably C-terminally truncated, preferably wherein said Cas13 is a truncated functional variant of the corresponding wild type Cas13, optionally wherein said truncated Cas13b is encoded by nt 1-984 of Prevotella sp. P5-125 Cas13b or the corresponding nt of a Cas13b orthologue or homologue.

[0018] In some embodiments, the guide sequence comprises more than one mismatch corresponding to different adenosine or cytidine sites in the target RNA sequence or wherein two guide molecules are used, each comprising a mismatch corresponding to a different adenosine or cytidine sites in the target RNA sequence. In some embodiments, the Cas13 protein and optionally said nucleotide deaminase protein or catalytic domain thereof comprise one or more heterologous nuclear export signal(s) (NES(s)) or nuclear localization signal(s) (NLS(s)), preferably an HIV Rev NES or MAPK NES, preferably C-terminal.

[0019] In some embodiments, the target RNA sequence of interest is within a cell, preferably a eukaryotic cell, most preferably a human or non-human animal cell, or a plant cell.

[0020] In another aspect, the present disclosure includes a method of modifying post-translational modification sites on a protein encoded by a target RNA comprising: contacting the target RNA with the system disclosed herein. In some embodiments, the (a), (b), and (c) are delivered or are to be delivered as one or more polynucleotide molecules, as a ribonucleoprotein complex, optionally via particles, vesicles, or one or more viral vectors.

[0021] In another aspect, the present disclosure includes systems or methods for use in prophylactic or therapeutic treatment, preferably wherein said target locus of interest is within a human or animal. In another aspect, the present disclosure includes for use in the treatment or prevention of a disease caused by transcripts containing a pathogenic G→A or C→T point mutation. Such systems and methods may be those disclosed herein.

[0022] In some embodiments, the disease is selected from Meier-Gorlin syndrome, Seckel syndrome 4, Joubert syndrome 5, Leber congenital amaurosis 10; Charcot-Marie-Tooth disease, type 2; Charcot-Marie-Tooth disease, type 2; Usher syndrome, type 2C; Spinocerebellar ataxia 28; Spinocerebellar ataxia 28; Spinocerebellar ataxia 28; Long QT syndrome 2; Sjögren-Larsson syndrome; Hereditary fructosuria; Hereditary fructosuria; Neuroblastoma; Neuroblastoma; Kallmann syndrome 1; Kallmann syndrome 1; Kallmann syndrome 1; Metachromatic leukodystrophy, Rett syndrome, Amyotrophic lateral sclerosis type 10, Li-Fraumeni syndrome, or a disease listed in Table 5; or wherein said disease is a premature termination disease or cancer. In some embodiments, the modification affects the fertility of an organism, wherein said modification affects splicing of said target RNA sequence, wherein said modification introduces a mutation in a transcript introducing an amino acid change and causing expression of a new antigen in a cancer cell, wherein said deamination of said Adenine in said target RNA of interest causes a gain of function or a loss of function of a gene. In some embodiments, the modification silences ubiquitination, methylation, acetylation, succinylation, glycosylation, O-GlcNAc, O-linked glycosylation, iodination, nitrosylation, sulfation, caboxyglutamation, phosphorylation, or a combination thereof. In some embodiments, the modification prevents pathological activated cell-signaling mediated by the post-translational modification. In some embodiments, the modification increases or decreases a half-life of a target protein by modifying a degron encoded by the target nucleic acid sequence.

[0023] In another aspect, the present disclosure includes a cell obtained from the method herein and/or comprising the system herein, or progeny of said modified cell. In some embodiments, the cell comprises a hypoxanthine or a guanine in replace of said Adenine in said target RNA of interest compared to a corresponding cell not subjected to the method. In some embodiments, the cell or a progeny thereof, wherein said cell is a eukaryotic cell, preferably a human or non-human animal cell, optionally a therapeutic T cell or an antibody-producing B-cell or wherein said cell is a plant cell.

[0024] In another aspect, the present disclosure includes a non-human animal comprising the modified cell or a progeny thereof. In another aspect, the present disclosure includes a plant comprising of the cell of or a progeny. In another aspect, the present disclosure includes a modified cell or use in therapy, preferably cell therapy.

[0025] At least another aspect of the invention relates to a method of modifying an Adenine in a target RNA sequence of interest. In particular embodiments, the method comprises delivering to said target RNA: (a) a catalytically inactive (dead) Cas13 protein; (b) a guide molecule which comprises a guide sequence linked to a direct repeat sequence; and (c) an adenosine deaminase protein or catalytic domain thereof; wherein said adenosine deaminase protein or catalytic domain thereof is covalently or non-covalently linked to said dead Cas13 protein or said guide molecule or is adapted to link thereto after delivery; wherein guide molecule forms a complex with said dead Cas13 protein and directs said complex to bind said target RNA sequence of interest, wherein said guide sequence is capable of hybridizing with a target sequence comprising said Adenine to form an RNA duplex, wherein said guide sequence comprises a non-pairing Cytosine at a position corresponding to said Adenine resulting in an A-C mismatch in the RNA duplex formed; wherein said adenosine deaminase protein or catalytic domain thereof deaminates said Adenine in said RNA duplex.

[0026] In certain example embodiment the Cas13 protein is Cas13a, Cas13b or Cas 13c.

[0027] The adenosine deaminase protein or catalytic domain thereof is fused to N- or C-terminus of said dead Cas13 protein. In certain example embodiments, the adenosine deaminase protein or catalytic domain thereof is fused to said dead Cas13 protein by a linker. The linker may be (GGGGS)₃₋₁₁ (SEQ ID Nos. 1-9) GSG₅ (SEQ ID No. 10) or LEPGEKPYKCPECGKSFSQSGALTRHQRTHTR (SEQ ID No. 11).

[0028] In certain example embodiments, the adenosine deaminase protein or catalytic domain thereof is linked to an adaptor protein and said guide molecule or said dead Cas13 protein comprises an aptamer sequence capable of binding to said adaptor protein. The adaptor sequence may be selected from MS2, PP7, Qβ, F2, GA, fr, JP501, M12, R17, BZ13, JP34, JP500, KU1, M11, MX1, TW18, VK, SP, FI, ID2, NL95, TW19, AP205, ϕCb5, ϕCb8r, ϕCb12r, ϕCb23r, 7s and PRR1.

[0029] In certain example embodiments, the adenosine deaminase protein or catalytic domain thereof is inserted into an internal loop of said dead Cas13 protein. In certain example embodiments, the Cas13a protein comprises one or more mutations in the two HEPN domains, particularly at position R474 and R1046 of Cas 13a protein originating from Leptotrichia wadei or amino acid positions corresponding thereto of a Cas13a ortholog.

[0030] In certain example embodiments, the Cas 13 protein is a Cas13b proteins, and the Cas13b comprises a mutation in one or more of positions R116, H121, R1177, H1182 of Cas13b protein originating from Bergeyella zoohelcum ATCC 43767 or amino acid positions corresponding thereto of a Cas13b ortholog. In certain other example embodiments, the mutation is one or more of R116A, H121A, R1177A, H1182A of Cas13b protein originating from Bergeyella zoohelcum ATCC 43767 or amino acid positions corresponding thereto of a Cas13b ortholog.

[0031] In certain example embodiments, the guide sequence has a length of about 29-53 nt capable of forming said RNA duplex with said target sequence. In certain other example embodiments, the guide sequence has a length of about 40-50 nt capable of forming said RNA duplex with said target sequence. In certain example embodiments, the distance between said non-pairing C and the 5′ end of said guide sequence is 20-30 nucleotides.

[0032] In certain example embodiments, the adenosine deaminase protein or catalytic domain thereof is a human, cephalopod, or Drosophila adenosine deaminase protein or catalytic domain thereof. In certain example embodiments, the adenosine deaminase protein or catalytic domain thereof has been modified to comprise a mutation at glutamic acid⁴⁸⁸ of the hADAR2-D amino acid sequence, or a corresponding position in a homologous ADAR protein. In certain example embodiments, the glutamic acid residue may be at position 488 or a corresponding position in a homologous ADAR protein is replaced by a glutamine residue (E488Q).

[0033] In certain other example embodiments, the adenosine deaminase protein or catalytic domain thereof is a mutated hADAR2d comprising mutation E488Q or a mutated hADAR1d comprising mutation E1008Q.

[0034] In certain example embodiments, the guide sequence comprises more than one mismatch corresponding to different adenosine sites in the target RNA sequence or wherein two guide molecules are used, each comprising a mismatch corresponding to a different adenosine sites in the target RNA sequence.

[0035] In certain example embodiments, the Cas13 protein and optionally said adenosine deaminase protein or catalytic domain thereof comprise one or more heterologous nuclear localization signal(s) (NLS(s)).

[0036] In certain example embodiments, the method further comprises, determining the target sequence of interest and selecting an adenosine deaminase protein or catalytic domain thereof which most efficiently deaminates said Adenine present in then target sequence.

[0037] The target RNA sequence of interest may be within a cell. The cell may be a eukaryotic cell, a non-human animal cell, a human cell, a plant cell. The target locus of interest may be within an animal or plant.

[0038] The target RNA sequence of interest may comprise in an RNA polynucleotide in vitro.

[0039] The components of the systems described herein may be delivered to said cell as a ribonucleoprotein complex or as one or more polynucleotide molecules. The one or more polynucleotide molecules may comprise one or more mRNA molecules encoding the components. The one or more polynucleotide molecules may be comprised within one or more vectors. The one or more polynucleotide molecules may further comprise one or more regulatory elements operably configured to express said Cas13 protein, said guide molecule, and said adenosine deaminase protein or catalytic domain thereof, optionally wherein said one or more regulatory elements comprise inducible promoters. The one or more polynucleotide molecules or said ribonucleoprotein complex may be delivered via particles, vesicles, or one or more viral vectors. The particles may comprise a lipid, a sugar, a metal or a protein. The particles may comprise lipid nanoparticles. The vesicles may comprise exosomes or liposomes. The one or more viral vectors may comprise one or more of adenovirus, one or more lentivirus or one or more adeno-associated virus.

[0040] The methods disclosed herein may be used to modify a cell, a cell line or an organism by manipulation of one or more target RNA sequences.

[0041] In certain example embodiments, the deamination of said Adenine in said target RNA of interest remedies a disease caused by transcripts containing a pathogenic G→A or C→T point mutation.

[0042] The methods maybe be used to treat a disease. In certain example embodiments, the disease is selected from Meier-Gorlin syndrome, Seckel syndrome 4, Joubert syndrome 5, Leber congenital amaurosis 10; Charcot-Marie-Tooth disease, type 2; Charcot-Marie-Tooth disease, type 2; Usher syndrome, type 2C; Spinocerebellar ataxia 28; Spinocerebellar ataxia 28; Spinocerebellar ataxia 28; Long QT syndrome 2; Sjögren-Larsson syndrome; Hereditary fructosuria; Hereditary fructosuria; Neuroblastoma; Neuroblastoma; Kallmann syndrome 1; Kallmann syndrome 1; Kallmann syndrome 1; Metachromatic leukodystrophy, Rett syndrome, Amyotrophic lateral sclerosis type 10, Li-Fraumeni syndrome, or a disease listed in Table 5. The disease may be a premature termination disease.

[0043] The methods disclosed herein, may be used to make a modification that affects the fertility of an organism. The modification may affects splicing of said target RNA sequence. The modification may introduce a mutation in a transcript introducing an amino acid change and causing expression of a new antigen in a cancer cell.

[0044] In certain example embodiments, the target RNA may be a microRNA or comprised within a microRNA. In certain example embodiments, the deamination of said Adenine in said target RNA of interest causes a gain of function or a loss of function of a gene. In certain example embodiments, the gene is a gene expressed by a cancer cell.

[0045] In another aspect, the invention comprises a modified cell or progeny thereof that is obtained using the methods disclosed herein, wherein said cell comprises a hypoxanthine or a guanine in replace of said Adenine in said target RNA of interest compared to a corresponding cell not subjected to the method. The modified cell or progeny thereof may be a eukaryotic cell an animal cell, a human cell, a therapeutic T cell, an antibody-producing B cell, a plant cell.

[0046] In another aspect, the invention comprises a non-human animal comprising said modified cell or progeny thereof. The modified may be a plant cell.

[0047] In another aspect, the invention comprises a method for cell therapy, comprising administering to a patient in need thereof the modified cells disclosed herein, wherein the presence of said modified cell remedies a disease in the patient.

[0048] In another aspect, the invention is directed to an engineered, non-naturally occurring system suitable for modifying an Adenine in a target locus of interest, comprising A) a guide molecule which comprises a guide sequence linked to a direct repeat sequence, or a nucleotide sequence encoding said guide molecule; B) a catalytically inactive Cas13 protein, or a nucleotide sequence encoding said catalytically inactive Cas13 protein; C) an adenosine deaminase protein or catalytic domain thereof, or a nucleotide sequence encoding said adenosine deaminase protein or catalytic domain thereof; wherein said adenosine deaminase protein or catalytic domain thereof is covalently or non-covalently linked to said Cas13 protein or said guide molecule or is adapted to link thereto after delivery; wherein said guide sequence is capable of hybridizing with a target RNA sequence comprising an Adenine to form an RNA duplex, wherein said guide sequence comprises a non-pairing Cytosine at a position corresponding to said Adenine resulting in an A-C mismatch in the RNA duplex formed.

[0049] In another aspect, the invention is directed to an engineered, non-naturally occurring vector system suitable for modifying an Adenine in a target locus of interest, comprising the nucleotide sequences of a), b) and c)

[0050] In another aspect, the invention is directed to an engineered, non-naturally occurring vector system, comprising one or more vectors comprising: a first regulatory element operably linked to a nucleotide sequence encoding said guide molecule which comprises said guide sequence, a second regulatory element operably linked to a nucleotide sequence encoding said catalytically inactive Cas13 protein; and a nucleotide sequence encoding an adenosine deaminase protein or catalytic domain thereof which is under control of said first or second regulatory element or operably linked to a third regulatory element; wherein, if said nucleotide sequence encoding an adenosine deaminase protein or catalytic domain thereof is operably linked to a third regulatory element, said adenosine deaminase protein or catalytic domain thereof is adapted to link to said guide molecule or said Cas13 protein after expression; wherein components A), B) and C) are located on the same or different vectors of the system.

[0051] As the methods disclosed herein demonstrate the ability of Cas13 proteins to function in mammalian cells for binding and specificity of cleaving RNA, additional extended applications include editing splice variants, and measuring how RNA-binding proteins interact with RNA.

[0052] In another aspect, the invention is directed to in vitro or ex vivo host cell or progeny thereof or cell line or progeny thereof comprising the systems disclosed herein. The host cell or progeny thereof may be a eukaryotic cell, an animal cell, a human cell, or a plant cell.

[0053] These and other aspects, objects, features, and advantages of the example embodiments will become apparent to those having ordinary skill in the art upon consideration of the following detailed description of illustrated example embodiments.

### BRIEF DESCRIPTION OF THE DRAWINGS

[0054] An understanding of the features and advantages of the present invention will be obtained by reference to the following detailed description that sets forth illustrative embodiments, in which the principles of the invention may be utilized, and the accompanying drawings of which:

[0055] FIG. 1 illustrates an example embodiment of the invention for targeted deamination of adenine at a target RNA sequence of interest, exemplified herein with a Cas13b protein.

[0056] FIG. 2 illustrates the Development of RNA editing as a therapeutic strategy to treat human disease at the transcript level such as when using Cas13b. Schematic of RNA base editing by Cas13-ADAR2 fusion targeting an engineered pre-termination stop codon in the luciferase transcript.

[0057] FIG. 3 Guide position and length optimization to restore luciferase expression.

[0058] FIG. 4 Exemplary sequences of adenine deaminase proteins. (SEQ ID Nos. 650-656)

[0059] FIG. 5 Guides used in an exemplary embodiment (SEQ ID Nos. 657-660)

[0060] FIG. 6: Editing efficiency correlates to edited base being further away from the DR and having a long RNA duplex, which is accomplished by extending the guide length

[0061] FIG. 7 Greater editing efficiency the further the editing site is away from the DR/protein binding area.

[0062] FIG. 8 Distance of edited site from DR

[0063] FIGS. 9A and B: Fused ADAR1 or ADAR2 to Cas13b12 (double R HEPN mutant) on the N or C-terminus. Guides are perfect matches to the stop codon in luciferase. Signal appears correlated with distance between edited base and 5′ end of the guide, with shorter distances providing better editing.

[0064] FIGS. 10A-10C: Cluc/Gluc tiling for Cas13a/Cas13b interference

[0065] FIGS. 11A-11C: ADAR editing quantification by NGS (luciferase reporter).

[0066] FIG. 12: ADAR editing quantification by NGS (KRAS and PPIB).

[0067] FIGS. 13A-13C: Cas13a/b+shRNA specificity from RNA Seq.

[0068] FIG. 14: Mismatch specificity to reduce off targets (A:A or A:G) (SEQ ID Nos. 661-668)

[0069] FIG. 15: Mismatch for on-target activity

[0070] FIG. 16: ADAR Motif preference

[0071] FIG. 17: Larger bubbles to enhance RNA editing efficiency

[0072] FIG. 18: Editing of multiple A's in a transcript (SEQ ID Nos. 669-672)

[0073] FIG. 19: Guide length titration for RNA editing

[0074] FIGS. 20A-20F: Mammalian codon-optimized Cas13b orthologs mediate highly efficient RNA knockdown. (FIG. 20A) Schematic of representative Cas13a, Cas13b, and Cas13c loci and associated crRNAs. (FIG. 20B) Schematic of luciferase assay to measure Cas13a cleavage activity in HEK293FT cells. (FIG. 20C) RNA knockdown efficiency using two different guides targeting Cluc with 19 Cas13a, 15 Cas13b, and 5 Cas13c orthologs. Luciferase expression is normalized to the expression in non-targeting guide control conditions. (FIG. 20D) The top 7 orthologs performing in part C are assayed for activity with three different NLS and NES tags with two different guide RNAs targeting Cluc. (FIG. 20E) Cas13b12 and Cas13a2 (LwCas13a) are compared for knockdown activity against Gluc and Cluc. Guides are tiled along the transcripts and guides between Cas13b12 and Cas13a2 are position matched. (FIG. 20F) Guide knockdown for Cas13a2, Cas13b6, Cas13b11, and Cas13b12 against the endogenous KRAS transcript and are compared against corresponding shRNAs.

[0075] FIGS. 21A-21G: Cas13 enzymes mediate specific RNA knockdown in mammalian cells. (FIG. 21A) Schematic of semi-degenerate target sequences for Cas13a/b mismatch specificity testing. (SEQ ID Nos. 673-694) (FIG. 21B) Heatmap of single mismatch knockdown data for Cas13 a/b. Knockdown is normalized to non-targeting (NT) guides for each enzyme. (FIG. 21C) Double mismatch knockdown data for Cas13a. The position of each mismatch is indicated on the X and Y axes. Knockdown data is the sum of all double mismatches for a given set of positions. Data is normalized to NT guides for each enzyme. (FIG. 21D) Double mismatch knockdown data for Cas13b. See C for description. (FIG. 21E) RNA-seq data comparing transcriptome-wide specificity for Cas13 a/b and shRNA for position-matched guides. The Y axis represents read counts for the targeting condition and the X axis represents counts for the non-targeting condition. (FIG. 21F) RNA expression as calculated from RNA-seq data for Cas13 a/b and shRNA. (FIG. 21G) Significant off-targets for Cas13 a/b and shRNA from RNA-seq data. Significant off-targets were calculated using FDR <0.05.

[0076] FIGS. 22A-22F: Catalytically inactive Cas13b-ADAR fusions enable targeted RNA editing in mammalian cells. (FIG. 22A) Schematic of RNA editing with Cas13b-ADAR fusion proteins to remove stop codons on the Cypridina luciferase transcript. (FIG. 22B) RNA editing comparison between Cas13b fused with wild-type ADAR2 and Cas13b fused with the hyperactive ADAR2 E488Q mutant for multiple guide positions. Luciferase expression is normalized to Gaussia luciferase control values. (FIG. 22C) RNA editing comparisons between 30, 50, 70, and 84 nt guides designed to target various positions surrounding the editing site. (FIG. 22D) Schematic showing the position and length of guides used for sequencing quantification relative to the stop codon on the Cypridina luciferase transcript. (SEQ ID No. 695) (FIG. 22E) On- and off-target editing efficiencies for each guide design at the corresponding adenine bases on the Cypridina luciferase transcript as quantified by sequencing. (FIG. 22F) Luciferase readout of guides with varied bases opposite to the targeted adenine.

[0077] FIG. 23: Endogenous RNA editing with Cas13b-ADAR fusions. (A) Next generation sequencing of endogenous Cas13b12-ADAR editing of endogenous KRAS and PPIB loci. Two different regions per transcript were targeted and A->G editing was quantified at all adenines in the vicinity of the targeted adenine.

[0078] FIG. 24: Strategy for determining optimal guide position.

[0079] FIGS. 25A-25C: (FIG. 25A) Cas13b-huADAR2 promotes repair of mutated luciferase transcripts. (FIG. 25B) Cas13b-huADAR1 promotes repair of mutated luciferase transcripts. (FIG. 25C) Comparison of human ADAR1 and human ADAR2.

[0080] FIG. 26: Comparison of E488Q vs. wt dADAR2 editing. E488Q is a hyperactive mutant of dADAR2.

[0081] FIGS. 27A-27B: Transcripts targeted by Cas13b-huADAR2-E488Q contain the expected A-G edit. (FIG. 27A) heatmap. (FIG. 27B) Positions in template. Only A sites are shown with the editing rate to G as in heatmap.

[0082] FIGS. 28A-28B: Endogenous tiling of guides. (FIG. 28A) KRAS: heatmap. (top) Positions in template (bottom). Only A sites are shown with the editing rate to G as in heatmap. (FIG. 28B) PPIB: heatmap. (top) Positions in template (bottom). Only A sites are shown with the editing rate to G as in heatmap.

[0083] FIG. 29: Non-targeting editing.

[0084] FIG. 30: Linker optimization.

[0085] FIG. 31: Cas13b ADAR can be used to correct pathogenic A>G mutations from patients in expressed cDNAs.

[0086] FIG. 32: Cas13b-ADAR has a slight restriction on 5′ G motifs.

[0087] FIG. 33: Screening degenerate PFS locations for effect on editing efficiency. All PFS (4-N) identities have higher editing than non-targeting (SEQ ID NO:775-777).

[0088] FIG. 34: Reducing off-target editing in the target transcript.

[0089] FIG. 35: Reducing off-target editing in the target transcript.

[0090] FIGS. 36A-36B: Cas13b-ADAR transcriptome specificity. On-target editing is 71%. (FIG. 36A) targeting guide; 482 significant sites. (FIG. 36B) non-targeting guide; 949 significant sites. Note that chromosome 0 is Gluc and chromosome 1 is Cluc; human chromosomes are then in order after that.

[0091] FIG. 37A-37B: Cas13b-ADAR transcriptome specificity. (FIG. 37A) targeting guide. (FIG. 37B) non-targeting guide.

[0092] FIG. 38: Cas13b has the highest efficiency compared to competing ADAR editing strategies.

[0093] FIGS. 39A-39D: Competing RNA editing systems. (FIG. 39A-FIG. 39B) BoxB; on-target editing is 63%; (FIG. 39A) targeting guide—2020 significant sites; (FIG. 39B) non-targeting guide—1805 significant sites. (FIG. 39C-FIG. 39D) Stafforst; on-target editing is 36%; (FIG. 39C) targeting guide—176 significant sites; (FIG. 39D) non-targeting guide—186 significant sites.

[0094] FIG. 40: Dose titration of ADAR. crRNA amount is constant.

[0095] FIGS. 41A-41D: Dose response effect on specificity. (FIG. 41A-FIG. 41B) 150 ng Cas13-ADAR; on-target editing is 83%; (FIG. 41A) targeting guide—1231 significant sites; (FIG. 41B) non-targeting guide—520 significant sites. (FIG. 41C-FIG. 41D) 10 ng Cas13-ADAR; on-target editing is 80%; (FIG. 41C) targeting guide—347 significant sites; (FIG. 41D) non-targeting guide—223 significant sites.

[0096] FIGS. 42A-42B: ADAR1 seems more specific than ADAR2. On-target editing is 29%. (FIG. 42A) targeting guide; 11 significant sites. (FIG. 42B) non-targeting guide; 6 significant sites. Note that chromosome 0 is Gluc and chromosome 1 is Cluc; human chromosomes are then in order after that.

[0097] FIGS. 43A-43D: ADAR specificity mutants have enhanced specificity. (FIG. 43A) Targeting guide. (FIG. 43B) Non-targeting guide. (FIG. 43C) Targeting to non-targeting ratio. (FIG. 43D) Targeting and non-targeting guide.

[0098] FIG. 44: ADAR mutant luciferase results plotted along the contact points of each residue with the RNA target (SEQ ID NO:778 and 779).

[0099] FIG. 45: ADAR specificity mutants have enhanced specificity. Purple points are mutants selected for whole transcriptome off-target NGS analysis. Red point is the starting point (i.e. E488Q mutant). Note that all additional mutants also have the E488Q mutation.

[0100] FIGS. 46A-46B: ADAR mutants are more specific according to NGS. (FIG. 46A) on target. (FIG. 46B) Off-target.

[0101] FIGS. 47A-47B: Luciferase data on ADAR specificity mutants matches the NGS. (FIG. 47A) Targeting guide selected for NGS. (FIG. 47B) Non-targeting guide selected for NGS. Luciferase data matches the NGS data in FIGS. 46A-46B. The orthologs that have fewer activity with non-targeting guide have fewer off-targets across the transcriptome and their on-target editing efficiency can be predicted by the targeting guide luciferase condition.

[0102] FIGS. 48A-48C: C-terminal truncations of Cas13b 12 are still highly active in ADAR editing.

[0103] FIGS. 49A-49G: Characterization of a highly active Cas13b ortholog for RNA knockdown FIG. 49A) Schematic of stereotypical Cas13 loci and corresponding crRNA structure.

[0104] FIG. 49B) Evaluation of 19 Cas13a, 15 Cas13b, and 7 Cas13c orthologs for luciferase knockdown using two different guides. Orthologs with efficient knockdown using both guides are labeled with their host organism name. Values are normalized to a non-targeting guide with designed against the E. coli LacZ transcript, with no homology to the human transcriptome. FIG. 49C) PspCas13b and LwaCas13a knockdown activity are compared by tiling guides against Gluc and measuring luciferase expression. Values represent mean+/−S.E.M. Non-targeting guide is the same as in FIG. 49B. FIG. 49D) PspCas13b and LwaCas13a knockdown activity are compared by tiling guides against Cluc and measuring luciferase expression. Values represent mean+/−S.E.M. Non-targeting guide is the same as in FIG. 49B. FIG. 49E) Expression levels in log 2(transcripts per million (TPM)) values of all genes detected in RNA-seq libraries of non-targeting control (x-axis) compared to Gluc-targeting condition (y-axis) for LwaCas13a (red) and shRNA (black). Shown is the mean of three biological replicates. The Gluc transcript data point is labeled. Non-targeting guide is the same as in FIG. 49B. FIG. 49F) Expression levels in log 2(transcripts per million (TPM)) values of all genes detected in RNA-seq libraries of non-targeting control (x-axis) compared to Gluc-targeting condition (y-axis) for PspCas13b (blue) and shRNA (black). Shown is the mean of three biological replicates. The Gluc transcript data point is labeled. Non-targeting guide is the same as in FIG. 49B. FIG. 49G) Number of significant off-targets from Gluc knockdown for LwaCas13a, PspCas13b, and shRNA from the transcriptome wide analysis in E and F.

[0105] FIGS. 50A-50E: Engineering dCas13b-ADAR fusions for RNA editing FIG. 50A) Schematic of RNA editing by dCas13b-ADAR fusion proteins. Catalytically dead Cas13b (dCas13b) is fused to the deaminase domain of human ADAR (ADAR_{DD}), which naturally deaminates adenosines to insosines in dsRNA. The crRNA specifies the target site by hybridizing to the bases surrounding the target adenosine, creating a dsRNA structure for editing, and recruiting the dCas13b-ADAR_{DD} fusion. A mismatched cytidine in the crRNA opposite the target adenosine enhances the editing reaction, promoting target adenosine deamination to inosine, a base that functionally mimics guanosine in many cellular reactions. FIG. 50B) Schematic of Cypridina luciferase W85X target and targeting guide design. (SEQ ID Nos. 700 and 701) Deamination of the target adenosine restores the stop codon to the wildtype tryptophan. Spacer length is the region of the guide that contains homology to the target sequence. Mismatch distance is the number of bases between the 3′ end of the spacer and the mismatched cytidine. The cytidine mismatched base is included as part of the mismatch distance calculation. FIG. 50C) Quantification of luciferase activity restoration for Cas13b-dADAR1 (left) and Cas13b-ADAR2-cd (right) with tiling guides of length 30, 50, 70, or 84 nt. All guides with even mismatch distances are tested for each guide length. Values are background subtracted relative to a 30 nt non-targeting guide that is randomized with no sequence homology to the human transcriptome. FIG. 50D) Schematic of target site for targeting Cypridinia luciferase W85X. (SEQ ID No. 702) FIG. 50E) Sequencing quantification of A->I editing for 50 nt guides targeting Cypridinia luciferase W85X. Blue triangle indicates the targeted adenosine. For each guide, the region of duplex RNA is outlined in red. Values represent mean+/−S.E.M. Non-targeting guide is the same as in FIG. 50C.

[0106] FIGS. 51A-51D: Measuring sequence flexibility for RNA editing by REPAIRv1 FIG. 50A Schematic of screen for determining Protospacer Flanking Site (PFS) preferences of RNA editing by REPAIRv1. A randomized PFS sequence is cloned 5′ to a target site for REPAIR editing (SEQ ID NO:774). Following exposure to REPAIR, deep sequencing of reverse transcribed RNA from the target site and PFS is used to associate edited reads with PFS sequences. FIG. 50B) Distributions of RNA editing efficiencies for all 4-N PFS combinations at two different editing sites. FIG. 50C) Quantification of the percent editing of REPAIRv1 at Cluc W85 across all possible 3 base motifs. Values represent mean+/−S.E.M. Non-targeting guide is the same as in FIG. 50C. FIG. 50D) Heatmap of 5′ and 3′ base preferences of RNA editing at Cluc W85 for all possible 3 base motifs

[0107] FIGS. 52A-52G: Correction of disease-relevant mutations with REPAIRv1 FIG. 52A) Schematic of target and guide design for targeting AVPR2 878G>A. (SEQ ID Nos. 705-708) FIG. 52B) The 878G>A mutation in AVPR2 is corrected to varying percentages using REPAIRv1 with three different guide designs. For each guide, the region of duplex RNA is outlined in red. Values represent mean+/−S.E.M. Non-targeting guide is the same as in FIG. 50C. FIG. 52C) Schematic of target and guide design for targeting FANCC 1517G>A. (SEQ ID Nos. 709-712) FIG. 52D) The 1517G>A mutation in FANCC is corrected to varying percentages using REPAIRv1 with three different guide designs. For each guide, the region of duplex RNA is outlined in red. The heatmap scale bar is the same as in panel B. Values represent mean+/−S.E.M. Non-targeting guide is the same as in FIG. 50C. FIG. 52E) Quantification of the percent editing of 34 different disease-relevant G>A mutations using REPAIRv1. Non-targeting guide is the same as in FIG. 50C.

[0108] FIG. 52F) Analysis of all the possible G>A mutations that could be corrected as annotated by the ClinVar database. The distribution of editing motifs for all G>A mutations in ClinVar is shown versus the editing efficiency by REPAIRv1 per motif as quantified on the Gluc transcript. FIG. 52G) The distribution of editing motifs for all G>A mutations in ClinVar is shown versus the editing efficiency by REPAIRv1 per motif as quantified on the Gluc transcript. Values represent mean+/−S.E.M.

[0109] FIGS. 53A-53D: Characterizing specificity of REPAIRv1 FIG. 53A) Schematic of KRAS target site and guide design. (SEQ ID Nos. 713-720) FIG. 53B) Quantification of percent editing for tiled KRAS-targeting guides. Editing percentages are shown at the on-target and neighboring adenosine sites. For each guide, the region of duplex RNA is indicated by a red rectangle. Values represent mean+/−S.E.M. FIG. 53C) Transcriptome-wide sites of significant RNA editing by REPAIRv1 with Cluc targeting guide. The on-target site Cluc site (254 A>G) is highlighted in orange. FIG. 53D) Transcriptome-wide sites of significant RNA editing by REPAIRv1 (150 ng REPAIR vector transfected) with non-targeting guide. Non-targeting guide is the same as in FIG. 50C.

[0110] FIGS. 54A-54F: Rational mutagenesis of ADAR2 to improve the specificity of REPAIRv1 FIG. 54A) Quantification of luciferase signal restoration by various dCas13-ADAR2 mutants as well as their specificity score plotted along a schematic for the contacts between key ADAR2 deaminase residues and the dsRNA target. All deaminase mutations were made on the dCas13-ADAR2_{DD}(E488Q) background (SEQ ID NO:781 and 781). The specificity score is defined as the ratio of the luciferase signal between targeting guide and non-targeting guide conditions. Schematic of ADAR2 deaminase domain contacts with dsRNA is adapted from ref (20) FIG. 54B) Quantification of luciferase signal restoration by various dCas13-ADAR2 mutants versus their specificity score. Non-targeting guide is the same as in FIG. 50C. FIG. 54C) Measurement of the on-target editing fraction as well as the number of significant off-targets for each dCas13-ADAR2 mutant by transcriptome wide sequencing of mRNAs. Values represent mean+/−S.E.M. Non-targeting guide is the same as in FIG. 50C. FIG. 54D) Transcriptome-wide sites of significant RNA editing by REPAIRv1 and REPAIRv2 with a guide targeting a pretermination site in Cluc. The on-target Cluc site (254 A>G) is highlighted in orange. 10 ng of REPAIR vector was transfected for each condition. FIG. 54E) RNA sequencing reads surrounding the on-target Cluc editing site (SEQ ID No. 721, 782-819) (254 A>G) highlighting the differences in off-target editing between REPAIRv1 and REPAIRv2. All A>G edits are highlighted in red while sequencing errors are highlighted in blue. Gaps reflect spaces between aligned reads. Non-targeting guide is the same as in FIG. 50C. FIG. 54F) RNA editing by REPAIRv1 and REPAIRv2 with guides targeting an out-of-frame UAG site in the endogenous KRAS and PPIB transcripts. The on-target editing fraction is shown as a sideways bar chart on the right for each condition row. The duplex region formed by the guide RNA is shown by a red outline box. Values represent mean+/−S.E.M. Non-targeting guide is the same as in FIG. 50C.

[0111] FIGS. 55A-55C: Bacterial screening of Cas13b orthologs for in vivo efficiency and PFS determination. FIG. 55A) Schematic of bacterial assay for determining the PFS of Cas13b orthologs. Cas13b orthologs with beta-lactamase targeting spacers (SEQ ID No. 722) are co-transformed with beta-lactamase expression plasmids containing randomized PFS sequences and subjected to double selection. PFS sequences that are depleted during co-transformation with Cas13b suggest targeting activity and are used to infer PFS preferences. FIG. 55B) Quantitation of interference activity of Cas13b orthologs targeting beta-lactamase as measured by colony forming units (cfu). Values represent mean+/−S.D. FIG. 55C) PFS logos for Cas13b orthologs as determined by depleted sequences from the bacterial assay. PFS preferences are derived from sequences depleted in the Cas13b condition relative to empty vector controls. Depletion values used to calculate PFS weblogos are listed in table 7.

[0112] FIGS. 56A-56E: Optimization of Cas13b knockdown and further characterization of mismatch specificity. FIG. 56A) Gluc knockdown with two different guides is measured using the top 2 Cas13a and top 4 Cas13b orthologs fused to a variety of nuclear localization and nuclear export tags. FIG. 56B) Knockdown of KRAS is measured for LwaCas13a, RanCas13b, PguCas13b, and PspCas13b with four different guides and compared to four position-matched shRNA controls. Non-targeting guide is the same as in FIG. 49B. shRNA non-targeting guide sequence is listed in table 11. FIG. 56C) Schematic of the single and double mismatch plasmid libraries used for evaluating the specificity of LwaCas13a and PspCas13b knockdown. Every possible single and double mismatch is present in the target sequence as well as in 3 positions directly flanking the 5′ and 3′ ends of the target site. (SEQ ID Nos. 723-735) FIG. 56D) The depletion level of transcripts with the indicated single mismatches are plotted as a heatmap for both the LwaCas13a and PspCas13b conditions. (SEQ ID Nos. 723 and 736) The wildtype base is outlined by a green box. FIG. 56E) The depletion level of transcripts with the indicated double mismatches are plotted as a heatmap for both the LwaCas13a and PspCas13b conditions (SEQ ID Nos. 723 and 736). Each box represents the average of all possible double mismatches for the indicated position.

[0113] FIGS. 57A-57F: Characterization of design parameters for dCas13-ADAR2 RNA editing FIG. 57A) Knockdown efficiency of Gluc targeting for wildtype Cas13b and catalytically inactive H133A/H1058A Cas13b (dCas13b). FIG. 57B) Quantification of luciferase activity restoration by dCas13b fused to either the wildtype ADAR2 catalytic domain or the hyperactive E488Q mutant ADAR2 catalytic domain, tested with tiling Cluc targeting guides. FIG. 57C) Guide design and sequencing quantification of A->I editing for 30 nt guides targeting Cypridinia luciferase W85X (SEQ ID Nos. 737-745). FIG. 57D) Guide design and sequencing quantification of A->I editing for 50 nt guides targeting PPIB (SEQ ID Nos. 746-753). FIG. 57E) Influence of linker choice on luciferase activity restoration by REPAIRv1. FIG. 57F) Influence of base identify opposite the targeted adenosine on luciferase activity restoration by REPAIRv1 (SEQ ID Nos. 754 and 755). Values represent mean+/−S.E.M.

[0114] FIG. 58: ClinVar motif distribution for G>A mutations. The number of each possible triplet motif observed in the ClinVar database for all G>A mutations.

[0115] FIG. 59: Truncations of dCas13b still have functional RNA editing. Various N-terminal and C-terminal truncations of dCas13b allow for RNA editing as measured by restoration of luciferase signal for the Cluc W85X reporter. Values represent mean+/−S.E.M. The construct length refers to the coding sequence of the REPAIR constructs.

[0116] FIGS. 60A-60F: Comparison of other programmable ADAR systems with the dCas13-ADAR2 editor. FIG. 60A) Schematic of two programmable ADAR schemes: BoxB-based targeting and full length ADAR2 targeting. In the BoxB scheme (top), the ADAR2 deaminase domain (ADAR2_{DD}(E488Q)) is fused to a small bacterial virus protein called lambda N ( [symbol] N), which binds specifically a small RNA sequence called BoxB- [symbol] , and the fusion protein is recruited to target adenosines by a guide RNA containing homology to the target site and hairpins that BoxB- [symbol] binds to. Full length ADAR2 targeting utilizes a guide RNA with homology to the target site and a motif recognized by the double strand RNA binding domains of ADAR2. A guide RNA containing two BoxB- [symbol] , hairpins can then guide the ADAR2_{DD}(E488Q), − [symbol] N for site specific editing. In the full length ADAR2 scheme (bottom), the dsRNA binding domains of ADAR2 bind a hairpin in the guide RNA, allowing for programmable ADAR2 editing (SEQ ID Nos. 756-760). FIG. 60B) Transcriptome-wide sites of significant RNA editing by BoxB-ADAR2_{DD}(E488Q) with a guide targeting Cluc and a non-targeting guide. The on-target Cluc site (254 A>G) is highlighted in orange. FIG. 60C) Transcriptome-wide sites of significant RNA editing by ADAR2 with a guide targeting Cluc and a non-targeting guide. The on-target Cluc site (254 A>G) is highlighted in orange. FIG. 60D) Transcriptome-wide sites of significant RNA editing by REPAIRv1 with a guide targeting Cluc and a non-targeting guide. The on-target Cluc site (254 A>G) is highlighted in orange. The non-targeting guide is the same as in FIG. 50C. FIG. 60E) Quantitation of on-target editing rate percentage for BoxB-ADAR2_{DD}(E488Q), ADAR2, and REPAIRv1 for targeting guides against Cluc. FIG. 60F) Overlap of off-target sites between different targeting and non-targeting conditions for programmable ADAR systems. The values plotted are the percent of the maximum possible intersection of the two off-target data sets.

[0117] FIGS. 61A-61C: Efficiency and specificity of dCas13b-ADAR2 mutants FIG. 61A) Quantitation of luciferase activity restoration by dCas13b-ADAR2_{DD}(E488Q) mutants for Cluc-targeting and non-targeting guides. Non-targeting guide is the same as in FIG. 50C. FIG. 61B) Relationship between the ratio of targeting and non-targeting guides and the number of RNA-editing off-targets as quantified by transcriptome-wide sequencing FIG. 61C) Quantification of number of transcriptome-wide off-target RNA editing sites versus on-target Cluc editing efficiency for dCas13b-ADAR2_{DD}(E488Q) mutants.

[0118] FIGS. 62A-62B: Transcriptome-wide specificity of RNA editing by dCas13b-ADAR2 DD(E488Q) mutants FIG. 62A) Transcriptome-wide sites of significant RNA editing by dCas13b-ADAR2_{DD}(E488Q) mutants with a guide targeting Cluc. The on-target Cluc site (254 A>G) is highlighted in orange. FIG. 62B) Transcriptome-wide sites of significant RNA editing by dCas13b-ADAR2_{DD}(E488Q) mutants with a non-targeting guide.

[0119] FIGS. 63A-63C: Characterization of motif biases in the off-targets of dCas13b-ADAR2_{DD}(E488Q) editing. FIG. 63A) For each dCas13b-ADAR2_{DD}(E488Q) mutant, the motif present across all A>G off-target edits in the transcriptome is shown. FIG. 63B) The distribution of off-target A>I edits per motif identity is shown for REPAIRv1 with targeting and non-targeting guide. FIG. 63C) The distribution of off-target A>I edits per motif identity is shown for REPAIRv2 with targeting and non-targeting guide.

[0120] FIGS. 64A-64F: Further characterization of REPAIRv1 and REPAIRv2 off-targets. FIG. 64A) Histogram of the number of off-targets per transcript for REPAIRv1. FIG. 64B) Histogram of the number of off-targets per transcript for REPAIRv2. FIG. 64C) Variant effect prediction of REPAIRv1 off targets. FIG. 64D) Distribution of REPAIRv1 off targets in cancer-related genes. TSG, tumor suppressor gene. FIG. 64E) Variant effect prediction of REPAIRv2 off targets. FIG. 64F) Distribution of REPAIRv2 off targets in cancer-related genes.

[0121] FIGS. 65A-65C: RNA editing efficiency and specificity of REPAIRv1 and REPAIRv2. FIG. 65A) Quantification of percent editing of KRAS with KRAS-targeting guide 1 at the targeted adenosine and neighboring sites for REPAIRv1 and REPAIRv2. For each guide, the region of duplex RNA is outlined in red. Values represent mean+/−S.E.M. Non-targeting guide is the same as in FIG. 50C. FIG. 65B) Quantification of percent editing of KRAS with KRAS-targeting guide 3 at the targeted adenosine and neighboring sites for REPAIRv1 and REPAIRv2. Non-targeting guide is the same as in FIG. 50C. FIG. 65C) Quantification of percent editing of PPIB with PPIB-targeting guide 2 at the targeted adenosine and neighboring sites for REPAIRv1 and REPAIRv2. Non-targeting guide is the same as in FIG. 50C.

[0122] FIGS. 66A-66G: Demonstration of all potential codon changes with a A>I RNA editor. FIG. 66A) Table of all potential codon transitions enabled by A>I editing. FIG. 66B) A codon table demonstrating all the potential codon transitions enabled by A>I editing. Adapted and modified based on J. D. Watson, Molecular biology of the gene. (Pearson, Boston, ed. Seventh edition, 2014), pp. xxxiv, 872 pages (38). FIG. 66C) Model of REPAIR A to I editing of a precisely encoded nucleotide via a mismatch in the guide sequence. The A to I transition is mediated by the catalytic activity of the ADAR2 deaminase domain and will be read as a guanosine by translational machinery. The base change does not rely on endogenous repair machinery and is permanent for as long as the RNA molecule exists in the cell. FIG. 66D) REPAIR can be used for correction of Mendelian disease mutations. FIG. 66E) REPAIR can be used for multiplexed A to I editing of multiple variants for engineering pathways or modifying disease. Multiplexed guide delivery can be achieved by delivering a single CRISPR array expression cassette since the Cas13b enzyme processes its own array. FIG. 66F) REPAIR can be used for modifying protein function through amino acid changes that affect enzyme domains, such as kinases. FIG. 66G) REPAIR can modulate splicing of transcripts by modifying the splice acceptor site.

[0123] FIG. 67: Additional truncations of Psp dCas13b.

[0124] FIG. 68: Potential effect of dosage on off target activity.

[0125] FIGS. 69A-69D: Relative expression of Cas13 orthologs in mammalian cells and correlation of expression with interference activity. FIG. 69A) Expression of Cas13 orthologs as measured by msfGFP fluorescence. Cas13 orthologs C-terminally tagged with msfGFP were transfected into HEK293FT cells and their fluorescence measured 48 hours post transfection. FIG. 69B-69D) Correlation of Cas13 expression to interference activity. The average RLU of two Gluc targeting guides for Cas13 orthologs, separated by subfamily (FIG. 69B for Cas13a, FIG. 69C for Cas13b, and FIG. 69D for Cas13c, respectively), is plotted versus expression as determined by msfGFP fluorescence. The RLU for targeting guides are normalized to RLU for a non-targeting guide, whose value is set to 1. The non-targeting guide is the same as in FIG. 49B for Cas13b.

[0126] FIGS. 70A-70E: Comparison of RNA editing activity of dCas13b and REPAIRv1. FIG. 70A) Schematic of guides used to target the W85X mutation in the Cluc reporter (SEQ ID NO:820-827). FIG. 70B) Sequencing quantification of A to I editing for indicated guides transfected with dCas13b. For each guide, the region of duplex RNA is outlined in red. Values represent mean+1—S.E.M. Non-targeting guide is the same as in FIG. 50C. FIG. 70C) Sequencing quantification of A to I editing for indicated guides transfected with REPAIRv1. For each guide, the region of duplex RNA is outlined in red. Values represent mean+/−S.E.M. Non-targeting guide is the same as in FIG. 50C. FIG. 70D) Comparison of on-target A to I editing rates for dCas13b and dCas13b-ADAR2DD(E488Q) for guides tested in FIG. 70B and FIG. 70C. FIG. 70E) Influence of base identify opposite the targeted adenosine on luciferase activity restoration by REPAIRv1 (SEQ ID NO:828, 829). Values represent mean+/−S.E.M.

[0127] FIGS. 71A-71D: REPAIRv1 editing activity evaluated without a guide and in comparison to ADAR2 deaminase domain alone. FIG. 71A) Quantification of A to I editing of the Cluc W85X mutation by REPAIRv1 with and without guide as well as the ADAR2 deaminase domain only without guide. Values represent mean+/−S.E.M. Non-targeting guide is the same as in FIG. 50C. FIG. 71B) Number of differentially expressed genes in the REPAIRv1 and ADAR2DD conditions from FIG. 71 A. FIG. 71C) The number of significant off-targets from the REPAIRv1 and ADAR2DD conditions from FIG. 71A. FIG. 71D) Overlap of off-target A to I editing events between the REPAIRv1 and ADAR2DD conditions from FIG. 71A. The values plotted are the percent of the maximum possible intersection of the two off-target data sets.

[0128] FIGS. 72A-72B: Evaluation of off-target sequence similarity to the guide sequence. FIG. 72A) Distribution of the number of mismatches (hamming distance) between the targeting guide sequence and the off-target editing sites for REPAIRv1 with a Cluc targeting guide. FIG. 72B) Distribution of the number of mismatches (hamming distance) between the targeting guide sequence and the off-target editing sites for REPAIRv2 with a Cluc targeting guide.

[0129] FIGS. 73A-73B: Comparison of REPAIRv1, REPAIRv2, ADAR2 RNA targeting, and BoxB RNA targeting at two different doses of vector (150 ng and 10 ng effector). FIG. 73A) Quantification of RNA editing activity at the Cluc W85X (254 A>I) on-target editing site by REPAIRv1, REPAIRv2, ADAR2 RNA targeting, and BoxB RNA targeting approaches. Each of the four methods were tested with a targeting or non-targeting guide. Values shown are the mean of the three replicates. FIG. 73B) Quantification of RNA editing off-targets by REPAIRv1, REPAIRv2, ADAR2 RNA targeting, and BoxB RNA targeting approaches. Each of the four methods were tested with a targeting guide for the Cluc W85X (254 A>I) site or non-targeting guide. For REPAIR constructs, non-targeting guide is the same as in FIG. 50C.

[0130] FIGS. 74A-74D: RNA editing efficiency and genome-wide specificity of REPAIRv1 and REPAIRv2. FIG. 74A) Quantification of RNA editing activity at the PPIB guide 1 on-target editing site by REPAIRv1, REPAIRv2 with targeting and non-targeting guides. Values represent mean+/−S.E.M. FIG. 74B) Quantification of RNA editing activity at the PPIB guide 2 on-target editing site by REPAIRv1, REPAIRv2 with targeting and non-targeting guides. Values represent mean+/−S.E.M. FIG. 74C) Quantification of RNA editing off-targets by REPAIRv1 or REPAIRv2 with PPIB guide 1, PPIB guide 2, or non-targeting guide. FIG. 74D) Overlap of off-targets between REPAIRv1 for PPIB targeting, Cluc targeting, and non-targeting guides. The values plotted are the percent of the maximum possible intersection of the two off-target data sets.

[0131] FIGS. 75A-75D: High coverage sequencing of REPAIRv1 and REPAIRv2 off-targets. FIG. 75A) Quantitation of off-target edits for REPAIRv1 and REPAIRv2 as a function of read depth with a total of 5 million reads (12.5× coverage), 15 million reads (37.5× coverage) and 50 million reads (125× coverage) per condition. FIG. 75B) Overlap of off-target sites at different read depths of the following conditions: REPAIRv1 versus REPAIRv1 (left), REPAIRv2 versus REPAIRv2 (middle), and REPAIRv1 versus REPAIRv2 (right). The values plotted are the percent of the maximum possible intersection of the two off-target data sets. FIG. 75C) Editing rate of off-target sites compared to the coverage (log 2(number of reads)) of the off-target for REPAIRv1 and REPAIRv2 targeting conditions at different read depths. FIG. 75D) Editing rate of off-target sites compared to the log 2(TPM+1) of the off-target gene expression for REPAIRv1 and REPAIRv2 targeting conditions at different read depths.

[0132] FIGS. 76A-76D: Quantification of REPAIRv2 activity and off-targets in the U2OS cell line. FIG. 76A) Transcriptome-wide sites of significant RNA editing by REPAIRv2 with a guide targeting Cluc in the U2OS cell line. The on-target Cluc site (254 A>I) is highlighted in orange. FIG. 76B) Transcriptome-wide sites of significant RNA editing by REPAIRv2 with a non-targeting guide in the U2OS cell line. FIG. 76C) The on-target editing rate at the Cluc W85X (254 A>I) by REPAIRv2 with a targeting guide or non-targeting guide in the U2OS cell line. FIG. 76D) Quantification of off-targets by REPAIRv2 with a guide targeting Cluc or non-targeting guide in the U2OS cell line.

[0133] FIG. 77: Exemplary fusion points via which a nucleotide deaminase is linked to a Cas13b.

[0134] FIG. 78 shows mutations screened in 10 rounds for RESCUE.

[0135] FIG. 79 shows dose responses of the RESCUE mutants were tested on T motif.

[0136] FIG. 80 shows dose responses of the RESCUE mutants were tested on the C and G motif

[0137] FIGS. 81 and 82 show endogenous targeting with RESCUE v3, v6, v7, and v8.

[0138] FIG. 83 shows screening for mutations for RESCUE v9 was performed.

[0139] FIG. 84 shows potential mutations for RESCUEv9 were identified.

[0140] FIG. 85 shows Base flip and motif testing were performed.

[0141] FIG. 86 shows effects of RESCUEv9 was tested on different motif flip.

[0142] FIG. 87 shows comparison between B6 and B12 with RESCUE v1 and v8 with 50 bp guides.

[0143] FIG. 88 shows comparison between B6 and B12 with RESCUE v1 and v8 with 30 bp guides.

[0144] The figures herein are for illustrative purposes only and are not necessarily drawn to scale.

### DETAILED DESCRIPTION

### General Definitions

[0145] Unless defined otherwise, technical and scientific terms used herein have the same meaning as commonly understood by one of ordinary skill in the art to which this disclosure pertains. Definitions of common terms and techniques in molecular biology may be found in Molecular Cloning: A Laboratory Manual, 2^{nd} edition (1989) (Sambrook, Fritsch, and Maniatis); Molecular Cloning: A Laboratory Manual, 4^{th} edition (2012) (Green and Sambrook); Current Protocols in Molecular Biology (1987) (F.M. Ausubel et al. eds.); the series Methods in Enzymology (Academic Press, Inc.): PCR 2: A Practical Approach (1995) (M.J. MacPherson, B.D. Hames, and G.R. Taylor eds.): Antibodies, A Laboratory Manual (1988) (Harlow and Lane, eds.): Antibodies A Laboratory Manual, 2^{nd} edition 2013 (E.A. Greenfield ed.); Animal Cell Culture (1987) (R.I. Freshney, ed.); Benjamin Lewin, Genes IX, published by Jones and Bartlet, 2008 (ISBN 0763752223); Kendrew et al. (eds.), The Encyclopedia of Molecular Biology, published by Blackwell Science Ltd., 1994 (ISBN 0632021829); Robert A. Meyers (ed.), Molecular Biology and Biotechnology: a Comprehensive Desk Reference, published by VCH Publishers, Inc., 1995 (ISBN 9780471185710); Singleton et al., Dictionary of Microbiology and Molecular Biology 2nd ed., J. Wiley & Sons (New York, N.Y. 1994), March, Advanced Organic Chemistry Reactions, Mechanisms and Structure 4th ed., John Wiley & Sons (New York, N.Y. 1992); and Marten H. Hofker and Jan van Deursen, Transgenic Mouse Methods and Protocols, 2nd edition (2011).

[0146] Reference is made to U.S. Provisional 62/351,662 and 62/351,803, filed on Jun. 17, 2016, U.S. Provisional 62/376,377, filed on Aug. 17, 2016, U.S. Provisional 62/410,366, filed Oct. 19, 2016, U.S. Provisional 62/432,240, filed Dec. 9, 2016, U.S. provisional 62/471,792 filed Mar. 15, 2017, and U.S. Provisional 62/484,786 filed Apr. 12, 2017. Reference is made to International PCT application PCT/US2017/038154, filed Jun. 19, 2017. Reference is made to U.S. Provisional 62/471,710, filed Mar. 15, 2017 (entitled, “Novel Cas13B Orthologues CRISPR Enzymes and Systems,” Attorney Ref: BI-10157 VP 47627.04.2149). Reference is further made to U.S. Provisional 62/432,553, filed Dec. 9, 2016, U.S. Provisional 62/456,645, filed Feb. 8, 2017, and U.S. Provisional 62/471,930, filed Mar. 15, 2017 (entitled “CRISPR Effector System Based Diagnostics,” Attorney Ref. BI-10121 BROD 0842P) and US Provisional To Be Assigned, filed Apr. 12, 2017 (entitled “CRISPR Effector System Based Diagnostics,” Attorney Ref. BI-10121 BROD 0843P)

[0147] As used herein, the singular forms “a”, “an”, and “the” include both singular and plural referents unless the context clearly dictates otherwise.

[0148] The term “optional” or “optionally” means that the subsequent described event, circumstance or substituent may or may not occur, and that the description includes instances where the event or circumstance occurs and instances where it does not.

[0149] The recitation of numerical ranges by endpoints includes all numbers and fractions subsumed within the respective ranges, as well as the recited endpoints.

[0150] The terms “about” or “approximately” as used herein when referring to a measurable value such as a parameter, an amount, a temporal duration, and the like, are meant to encompass variations of and from the specified value, such as variations of +/−10% or less, +/−5% or less, +/−1% or less, and +/−0.1% or less of and from the specified value, insofar such variations are appropriate to perform in the disclosed invention. It is to be understood that the value to which the modifier “about” or “approximately” refers is itself also specifically, and preferably, disclosed.

[0151] As used herein, a “biological sample” may contain whole cells and/or live cells and/or cell debris. The biological sample may contain (or be derived from) a “bodily fluid”. The present invention encompasses embodiments wherein the bodily fluid is selected from amniotic fluid, aqueous humour, vitreous humour, bile, blood serum, breast milk, cerebrospinal fluid, cerumen (earwax), chyle, chyme, endolymph, perilymph, exudates, feces, female ejaculate, gastric acid, gastric juice, lymph, mucus (including nasal drainage and phlegm), pericardial fluid, peritoneal fluid, pleural fluid, pus, rheum, saliva, sebum (skin oil), semen, sputum, synovial fluid, sweat, tears, urine, vaginal secretion, vomit and mixtures of one or more thereof. Biological samples include cell cultures, bodily fluids, cell cultures from bodily fluids. Bodily fluids may be obtained from a mammal organism, for example by puncture, or other collecting or sampling procedures.

[0152] The terms “subject,” “individual,” and “patient” are used interchangeably herein to refer to a vertebrate, preferably a mammal, more preferably a human. Mammals include, but are not limited to, murines, simians, humans, farm animals, sport animals, and pets. Tissues, cells and their progeny of a biological entity obtained in vivo or cultured in vitro are also encompassed.

[0153] Various embodiments are described hereinafter. It should be noted that the specific embodiments are not intended as an exhaustive description or as a limitation to the broader aspects discussed herein. One aspect described in conjunction with a particular embodiment is not necessarily limited to that embodiment and can be practiced with any other embodiment(s). Reference throughout this specification to “one embodiment”, “an embodiment,” “an example embodiment,” means that a particular feature, structure or characteristic described in connection with the embodiment is included in at least one embodiment of the present invention. Thus, appearances of the phrases “in one embodiment,” “in an embodiment,” or “an example embodiment” in various places throughout this specification are not necessarily all referring to the same embodiment, but may. Furthermore, the particular features, structures or characteristics may be combined in any suitable manner, as would be apparent to a person skilled in the art from this disclosure, in one or more embodiments. Furthermore, while some embodiments described herein include some but not other features included in other embodiments, combinations of features of different embodiments are meant to be within the scope of the invention. For example, in the appended claims, any of the claimed embodiments can be used in any combination.

[0154] C2c2 is now known as Cas13a. It will be understood that the term “C2c2” herein is used interchangeably with “Cas13a”.

[0155] All publications, published patent documents, and patent applications cited herein are hereby incorporated by reference to the same extent as though each individual publication, published patent document, or patent application was specifically and individually indicated as being incorporated by reference.

### Overview

[0156] The embodiments disclosed herein provide systems, constructs, and methods for targeted base editing. In general the systems disclosed herein comprise a targeting component and a base editing component. The targeting component functions to specifically target the base editing component to a target nucleotide sequence in which one or more nucleotides are to be edited. The base editing component may then catalyze a chemical reaction to convert a first nucleotide in the target sequence to a second nucleotide. A target sequence may be an RNA sequence. Alternatively or additionally, a target sequence may be a DNA sequence. For example, the base editor may catalyze conversion of an adenine such that it is read as guanine by a cell's transcription or translation machinery, or vice versa. Likewise, the base editing component may catalyze conversion of cytidine to a uracil, or vice versa. In certain example embodiments, the base editor may be derived by starting with a known base editor, such as an adenine deaminase or cytodine deaminase, and modified using methods such as directed evolution to derive new functionalities. Directed evolution techniques are known in the art and may include those described in WO 2015/184016 “High-Throughput Assembly of Genetic Permuatations.”

### Compositions and Systems

[0157] In some aspects, the present disclosure includes systems for modifying a nucleobase in a nucleic acid sequence. In some examples, the system may be an engineered, non-naturally occurring system suitable for modifying a nucleobase in a target locus of interest. In some embodiments, the system may comprise one or more of (a) a CRISPR-Cas protein, more particularly a Cas13 protein which is catalytically inactive; (b) a guide molecule which comprises a guide sequence; and (c) an nucleotide deaminase protein or catalytic domain thereof. In some cases, the nucleotide deaminase protein or catalytic domain thereof is covalently or non-covalently linked to the CRISPR-Cas protein or the guide molecule or is adapted to link thereto after delivery. In some cases, the guide sequence is substantially complementary to the target sequence but comprises a non-pairing C corresponding to the A being targeted for deamination, resulting in an A-C mismatch in an RNA duplex formed by the guide sequence and the target sequence. For application in eukaryotic cells, the CRISPR-Cas protein and/or the nucleotide deaminase are preferably NLS-tagged.

[0158] The one or more components in the systems may be delivered to a cell for targeting the nucleic acid sequence of interest. In some embodiments, the components (a), (b) and (c) are delivered to the cell as a ribonucleoprotein complex. The ribonucleoprotein complex can be delivered via one or more lipid nanoparticles. In some embodiments, the components (a), (b) and (c) are delivered to the cell as one or more RNA molecules, such as one or more guide RNAs and one or more mRNA molecules encoding the CRISPR-Cas protein, the nucleotide deaminase protein, and optionally the adaptor protein. The RNA molecules can be delivered via one or more lipid nanoparticles. In some embodiments, the components (a), (b) and (c) are delivered to the cell as one or more DNA molecules. In some embodiments, the one or more DNA molecules are comprised within one or more vectors such as viral vectors (e.g., AAV). In some embodiments, the one or more DNA molecules comprise one or more regulatory elements operably configured to express the CRISPR-Cas protein, the guide molecule, and the nucleotide deaminase protein or catalytic domain thereof, optionally wherein the one or more regulatory elements comprise inducible promoters.

[0159] In some embodiments, the CRISPR-Cas protein is a dead Cas13. In some embodiments, the dead Cas13 is a dead Cas13a protein which comprises one or more mutations in the HEPN domain. In some embodiments, the dead Cas13a comprises a mutation corresponding to R474A and R1046A in Leptotrichia wadei (LwaCas13a). In some embodiments, the dead Cas13 is a dead Cas13b protein which comprises one or more of R116A, H121A, R1177A, H1182A of a Cas13b protein originating from Bergeyella zoohelcum ATCC 43767 or amino acid positions corresponding thereto of a Cas13b ortholog.

[0160] In some embodiments of the guide molecule is capable of hybridizing with a target sequence comprising the Adenine to be deaminated within an RNA sequence to form an RNA duplex which comprises a non-pairing Cytosine opposite to said Adenine. Upon RNA duplex formation, the guide molecule forms a complex with the Cas13 protein and directs the complex to bind the RNA polynucleotide at the target RNA sequence of interest. Details on the aspect of the guide of the AD-functionalized CRISPR-Cas system are provided herein below.

[0161] In some embodiments, a Cas13 guide RNA having a canonical length of, e.g. LawCas13 is used to form an RNA duplex with the target DNA. In some embodiments, a Cas13 guide molecule longer than the canonical length for, e.g. LawCas13a is used to form an RNA duplex with the target DNA including outside of the Cas13-guide RNA-target DNA complex.

[0162] In general, the system may comprise one or more of a catalytic inactive (dead) Cas protein (e.g., dead Cas13), a nucleotide deaminase protein or catalytic domain thereof, and a guide molecule. In certain examples, the nucleotide deaminase protein may be a an adenosine deaminase. In certain examples, the nucleotide deaminase protein may be a cytidine deaminase. The guide sequence may be designed to have a degree of complementarity with a target sequence at one or more codon comprising an adenine or cytidine and that is post-translationally modified.

### AD-Functionalized CRISPR System

[0163] The systems herein may comprise an AD-functionalized CRISPR system. The term “AD-functionalized CRISPR system” as used here refers to a nucleic acid targeting and editing system comprising one or more of (a) a CRISPR-Cas protein, more particularly a Cas13 protein which is catalytically inactive; (b) a guide molecule which comprises a guide sequence; and (c) an adenosine deaminase protein or catalytic domain thereof.

[0164] In at least a first design, the AD-functionalized CRISPR system comprises (a) an adenosine deaminase fused or linked to a CRISPR-Cas protein, wherein the CRISPR-Cas protein is catalytically inactive, and (b) a guide molecule comprising a guide sequence designed to introduce an A-C mismatch in an RNA duplex formed between the guide sequence and the target sequence. In some embodiments, the CRISPR-Cas protein and/or the adenosine deaminase are NLS-tagged, on either the N- or C-terminus or both.

[0165] In at least a second design, the AD-functionalized CRISPR system comprises (a) a CRISPR-Cas protein that is catalytically inactive, (b) a guide molecule comprising a guide sequence designed to introduce an A-C mismatch in an RNA duplex formed between the guide sequence and the target sequence, and an aptamer sequence (e.g., MS2 RNA motif or PP7 RNA motif) capable of binding to an adaptor protein (e.g., MS2 coating protein or PP7 coat protein), and (c) an adenosine deaminase fused or linked to an adaptor protein, wherein the binding of the aptamer and the adaptor protein recruits the adenosine deaminase to the RNA duplex formed between the guide sequence and the target sequence for targeted deamination at the A of the A-C mismatch. In some embodiments, the adaptor protein and/or the adenosine deaminase are NLS-tagged, on either the N- or C-terminus or both. The CRISPR-Cas protein can also be NLS-tagged.

[0166] The use of different aptamers and corresponding adaptor proteins also allows orthogonal gene editing to be implemented. In one example in which adenosine deaminase are used in combination with cytidine deaminase for orthogonal gene editing/deamination, sgRNA targeting different loci are modified with distinct RNA loops in order to recruit MS2-adenosine deaminase and PP7-cytidine deaminase (or PP7-adenosine deaminase and MS2-cytidine deaminase), respectively, resulting in orthogonal deamination of A or C at the target loci of interested, respectively. PP7 is the RNA-binding coat protein of the bacteriophage Pseudomonas. Like MS2, it binds a specific RNA sequence and secondary structure. The PP7 RNA-recognition motif is distinct from that of MS2. Consequently, PP7 and MS2 can be multiplexed to mediate distinct effects at different genomic loci simultaneously. For example, an sgRNA targeting locus A can be modified with MS2 loops, recruiting MS2-adenosine deaminase, while another sgRNA targeting locus B can be modified with PP7 loops, recruiting PP7-cytidine deaminase. In the same cell, orthogonal, locus-specific modifications are thus realized. This principle can be extended to incorporate other orthogonal RNA-binding proteins.

[0167] In at least a third design, the AD-functionalized CRISPR system comprises (a) an adenosine deaminase inserted into an internal loop or unstructured region of a CRISPR-Cas protein, wherein the CRISPR-Cas protein is catalytically inactive or a nickase, and (b) a guide molecule comprising a guide sequence designed to introduce an A-C mismatch in an RNA duplex formed between the guide sequence and the target sequence.

[0168] The AD-functionalized CRISPR system described herein can be used to target a specific Adenine within an RNA polynucleotide sequence for deamination. For example, the guide molecule can form a complex with the CRISPR-Cas protein and directs the complex to bind a target RNA sequence in the RNA polynucleotide of interest. Because the guide sequence is designed to have a non-pairing C, the RNA duplex formed between the guide sequence and the target sequence comprises an A-C mismatch, which directs the adenosine deaminase to contact and deaminate the A opposite to the non-pairing C, converting it to a Inosine (I). Since Inosine (I) base pairs with C and functions like G in cellular process, the targeted deamination of A described herein are useful for correction of undesirable G-A and C-T mutations, as well as for obtaining desirable A-G and T-C mutations.

[0169] In some embodiments, the AD-functionalized CRISPR system is used for targeted deamination in an RNA polynucleotide molecule in vitro. In some embodiments, the AD-functionalized CRISPR system is used for targeted deamination in a DNA molecule within a cell. The cell can be a eukaryotic cell, such as an animal cell, a mammalian cell, a human, or a plant cell.

### Protein Split

[0170] CRISPR-Cas protein split sites that are suitable for insertion of nucleotide deaminase can be identified with the help of a crystal structure. One can use the crystal structure of an ortholog if a relatively high degree of homology exists between the ortholog and the intended CRISPR-Cas protein.

[0171] The split position may be located within a region or loop. Preferably, the split position occurs where an interruption of the amino acid sequence does not result in the partial or full destruction of a structural feature (e.g. alpha-helixes or (3-sheets). Unstructured regions (regions that did not show up in the crystal structure because these regions are not structured enough to be “frozen” in a crystal) are often preferred options. The positions within the unstructured regions or outside loops may not need to be exactly the numbers provided above, but may vary by, for example 1, 2, 3, 4, 5, 6, 7, 8, 9, or even 10 amino acids either side of the position given above, depending on the size of the loop, so long as the split position still falls within an unstructured region of outside loop.

### CRISPR-Cas Protein and Guide

[0172] The systems herein may comprise a CRISPR-Cas protein. In some examples, in the methods and systems of the present invention use is made of a CRISPR-Cas protein and corresponding guide molecule. In some cases, the CRISPR-Cas protein is a class 2 CRISPR-Cas protein. In certain embodiments, said CRISPR-Cas protein is a Cas13. The CRISPR-Cas system does not require the generation of customized proteins to target specific sequences but rather a single Cas protein can be programmed by guide molecule to recognize a specific nucleic acid target, in other words the Cas enzyme protein can be recruited to a specific nucleic acid target locus of interest using said guide molecule.

### Crispr-Cas Enzyme

[0173] In its unmodified form, a CRISPR-Cas protein is a catalytically active protein. This implies that upon formation of a nucleic acid-targeting complex (comprising a guide RNA hybridized to a target sequence one or both DNA strands in or near (e.g., within 1, 2, 3, 4, 5, 6, 7, 8, 9, 10, 20, 50, or more base pairs from) the target sequence is modified (e.g. cleaved). As used herein the term “sequence(s) associated with a target locus of interest” refers to sequences near the vicinity of the target sequence (e.g. within 1, 2, 3, 4, 5, 6, 7, 8, 9, 10, 20, 50, or more base pairs from the target sequence, wherein the target sequence is comprised within a target locus of interest). The unmodified catalytically active Cas13 protein generates a staggered cut, whereby the cut sites are typically within the target sequence. More particularly, the staggered cut is typically 13-23 nucleotides distal to the PAM. In particular embodiments, the cut on the non-target strand is 17 nucleotides downstream of the PAM (i.e. between nucleotide 17 and 18 downstream of the PAM), while the cut on the target strand (i.e. strand hybridizing with the guide sequence) occurs a further 4 nucleotides further from the sequence complementary to the PAM (this is 21 nucleotides upstream of the complement of the PAM on the 3′ strand or between nucleotide 21 and 22 upstream of the complement of the PAM).

[0174] In the methods according to the present invention, the CRISPR-Cas protein is preferably mutated with respect to a corresponding wild-type enzyme such that the mutated CRISPR-Cas protein lacks the ability to cleave one or both DNA strands of a target locus containing a target sequence. In particular embodiments, one or more catalytic domains of the Cas13 protein are mutated to produce a mutated Cas protein which cleaves only one DNA strand of a target sequence.

[0175] In particular embodiments, the CRISPR-Cas protein may be mutated with respect to a corresponding wild-type enzyme such that the mutated CRISPR-Cas protein lacks substantially all DNA cleavage activity. In some embodiments, a CRISPR-Cas protein may be considered to substantially lack all DNA and/or RNA cleavage activity when the cleavage activity of the mutated enzyme is about no more than 25%, 10%, 5%, 1%, 0.1%, 0.01%, or less of the nucleic acid cleavage activity of the non-mutated form of the enzyme; an example can be when the nucleic acid cleavage activity of the mutated form is nil or negligible as compared with the non-mutated form.

[0176] In certain embodiments of the methods provided herein the CRISPR-Cas protein is a mutated CRISPR-Cas protein which cleaves only one DNA strand, i.e. a nickase. More particularly, in the context of the present invention, the nickase ensures cleavage within the non-target sequence, i.e. the sequence which is on the opposite DNA strand of the target sequence and which is 3′ of the PAM sequence. By means of further guidance, and without limitation, an arginine-to-alanine substitution (R1226A) in the Nuc domain of Cas13 from Acidaminococcus sp. converts Cas13 from a nuclease that cleaves both strands to a nickase (cleaves a single strand). It will be understood by the skilled person that where the enzyme is not AsCas13, a mutation may be made at a residue in a corresponding position. In particular embodiments, the Cas13 is FnCas13 and the mutation is at the arginine at position R1218. In particular embodiments, the Cas13 is LbCas13 and the mutation is at the arginine at position R1138. In particular embodiments, the Cas13 is MbCas13 and the mutation is at the arginine at position R1293.

[0177] In certain embodiments of the methods provided herein the CRISPR-Cas protein has reduced or no catalytic activity. Where the CRISPR-Cas protein is a Cas13 protein, the mutations may include but are not limited to one or more mutations in the catalytic RuvC-like domain, such as D908A or E993A with reference to the positions in AsCas13.

[0178] In some embodiments, a CRISPR-Cas protein is considered to substantially lack all DNA cleavage activity when the DNA cleavage activity of the mutated enzyme is about no more than 25%, 10%, 5%, 1%, 0.1%, 0.01%, or less of the DNA cleavage activity of the non-mutated form of the enzyme; an example can be when the DNA cleavage activity of the mutated form is nil or negligible as compared with the non-mutated form. In these embodiments, the CRISPR-Cas protein is used as a generic DNA binding protein. The mutations may be artificially introduced mutations or gain- or loss-of-function mutations.

[0179] In addition to the mutations described above, the CRISPR-Cas protein may be additionally modified. As used herein, the term “modified” with regard to a CRISPR-Cas protein generally refers to a CRISPR-Cas protein having one or more modifications or mutations (including point mutations, truncations, insertions, deletions, chimeras, fusion proteins, etc.) compared to the wild type Cas protein from which it is derived. By derived is meant that the derived enzyme is largely based, in the sense of having a high degree of sequence homology with, a wildtype enzyme, but that it has been mutated (modified) in some way as known in the art or as described herein.

[0180] In some embodiments, the C-terminus of the Cas13 effector can be truncated. For example, at least 20 amino acids, at least 40 amino acids, at least 50 amino acids, at least 60 amino acids, at least 80 amino acids, at least 100 amino acids, at least 120 amino acids, at least 140 amino acids, at least 150 amino acids, at least 160 amino acids, at least 180 amino acids, at least 200 amino acids, at least 220 amino acids, at least 240 amino acids, at least 250 amino acids, at least 260 amino acids, or at least 300 amino acids, or at least 350 amino acids, or up to 120 amino acids, or up to 140 amino acids, or up to 160 amino acids, or up to 180 amino acids, or up to 200 amino acids, or up to 250 amino acids, or up to 300 amino acids, or up to 350 amino acids, or up to 400 amino acids, may be truncated at the C-terminus of the Cas13 effector. Specific examples of Cas13b truncations include C-terminal Δ984-1090, C-terminal Δ1026-1090, and C-terminal Δ1053-1090, C-terminal Δ934-1090, C-terminal Δ884-1090, C-terminal Δ834-1090, C-terminal Δ784-1090, and C-terminal Δ734-1090, wherein amino acid positions correspond to amino acid positions of Prevotella sp. P5-125 Cas13b protein. See also FIG. 67. In some cases, the truncated Cas13b is encoded by nt 1-984 of Prevotella sp. P5-125 Cas13b or the corresponding nt of a Cas13b orthologue or homologue. Examples of Cas13 truncations also include C-terminal Δ795-1095, wherein amino acid positions correspond to amino acid positions of Riemerella anatipestifer Cas13b protein. Examples of Cas13 truncations further include C-terminal Δ875-1175, C-terminal 895-1175, C-terminal Δ915-1175, C-terminal Δ935-1175, C-terminal Δ955-1175, C-terminal 975-1175, C-terminal Δ995-1175, C-terminal Δ1015-1175, C-terminal Δ1035-1175, C-terminal Δ1055-1175, C-terminal Δ1075-1175, C-terminal Δ1095-1175, C-terminal Δ1115-1175, C-terminal Δ1135-1175, C-terminal Δ1155-1175, wherein amino acid positions correspond to amino acid positions of Porphyromonas gulae Cas13b protein.

[0181] In some embodiments, the N-terminus of the Cas13 effector protein may be truncated. For example, at least 20 amino acids, at least 40 amino acids, at least 50 amino acids, at least 60 amino acids, at least 80 amino acids, at least 100 amino acids, at least 120 amino acids, at least 140 amino acids, at least 150 amino acids, at least 160 amino acids, at least 180 amino acids, at least 200 amino acids, at least 220 amino acids, at least 240 amino acids, at least 250 amino acids, at least 260 amino acids, or at least 300 amino acids, or at least 350 amino acids, or up to 120 amino acids, or up to 140 amino acids, or up to 160 amino acids, or up to 180 amino acids, or up to 200 amino acids, or up to 250 amino acids, or up to 300 amino acids, or up to 350 amino acids, or up to 400 amino acids, may be truncated at the N-terminus of the Cas13 effector. Examples of Cas13 truncations include N-terminal Δ1-125, N-terminal Δ1-88, or N-terminal Δ1-72, wherein amino acid positions of the truncations correspond to amino acid positions of Prevotella sp. P5-125 Cas13b protein.

[0182] In some embodiments, both the N- and the C-termini of the Cas13 effector protein may be truncated. For example, at least 20 amino acids may be truncated at the C-terminus of the Cas13 effector, and at least 20 amino acids, at least 40 amino acids, at least 60 amino acids, at least 80 amino acids, at least 100 amino acids, at least 120 amino acids, at least 140 amino acids, at least 160 amino acids, at least 180 amino acids, at least 200 amino acids, at least 220 amino acids, at least 240 amino acids, at least 260 amino acids, at least 300 amino acids, or at least 350 amino acids may be truncated at the N-terminus of the Cas13 effector. For example, at least 40 amino acids may be truncated at the C-terminus of the Cas13 effector, and at least 20 amino acids, at least 40 amino acids, at least 60 amino acids, at least 80 amino acids, at least 100 amino acids, at least 120 amino acids, at least 140 amino acids, at least 160 amino acids, at least 180 amino acids, at least 200 amino acids, at least 220 amino acids, at least 240 amino acids, at least 260 amino acids, at least 300 amino acids, or at least 350 amino acids may be truncated at the N-terminus of the Cas13 effector. For example, at least 60 amino acids may be truncated at the C-terminus of the Cas13 effector, and at least 20 amino acids, at least 40 amino acids, at least 60 amino acids, at least 80 amino acids, at least 100 amino acids, at least 120 amino acids, at least 140 amino acids, at least 160 amino acids, at least 180 amino acids, at least 200 amino acids, at least 220 amino acids, at least 240 amino acids, at least 260 amino acids, at least 300 amino acids, or at least 350 amino acids may be truncated at the N-terminus of the Cas13 effector. For example, at least 80 amino acids may be truncated at the C-terminus of the Cas13 effector, and at least 20 amino acids, at least 40 amino acids, at least 60 amino acids, at least 80 amino acids, at least 100 amino acids, at least 120 amino acids, at least 140 amino acids, at least 160 amino acids, at least 180 amino acids, at least 200 amino acids, at least 220 amino acids, at least 240 amino acids, at least 260 amino acids, at least 300 amino acids, or at least 350 amino acids may be truncated at the N-terminus of the Cas13 effector. For example, at least 100 amino acids may be truncated at the C-terminus of the Cas13 effector, and at least 20 amino acids, at least 40 amino acids, at least 60 amino acids, at least 80 amino acids, at least 100 amino acids, at least 120 amino acids, at least 140 amino acids, at least 160 amino acids, at least 180 amino acids, at least 200 amino acids, at least 220 amino acids, at least 240 amino acids, at least 260 amino acids, at least 300 amino acids, or at least 350 amino acids may be truncated at the N-terminus of the Cas13 effector. For example, at least 120 amino acids may be truncated at the C-terminus of the Cas13 effector, and at least 20 amino acids, at least 40 amino acids, at least 60 amino acids, at least 80 amino acids, at least 100 amino acids, at least 120 amino acids, at least 140 amino acids, at least 160 amino acids, at least 180 amino acids, at least 200 amino acids, at least 220 amino acids, at least 240 amino acids, at least 260 amino acids, at least 300 amino acids, or at least 350 amino acids may be truncated at the N-terminus of the Cas13 effector. For example, at least 140 amino acids may be truncated at the C-terminus of the Cas13 effector, and at least 20 amino acids, at least 40 amino acids, at least 60 amino acids, at least 80 amino acids, at least 100 amino acids, at least 120 amino acids, at least 140 amino acids, at least 160 amino acids, at least 180 amino acids, at least 200 amino acids, at least 220 amino acids, at least 240 amino acids, at least 260 amino acids, at least 300 amino acids, or at least 350 amino acids may be truncated at the N-terminus of the Cas13 effector. For example, at least 160 amino acids may be truncated at the C-terminus of the Cas13 effector, and at least 20 amino acids, at least 40 amino acids, at least 60 amino acids, at least 80 amino acids, at least 100 amino acids, at least 120 amino acids, at least 140 amino acids, at least 160 amino acids, at least 180 amino acids, at least 200 amino acids, at least 220 amino acids, at least 240 amino acids, at least 260 amino acids, at least 300 amino acids, or at least 350 amino acids may be truncated at the N-terminus of the Cas13 effector. For example, at least 180 amino acids may be truncated at the C-terminus of the Cas13 effector, and at least 20 amino acids, at least 40 amino acids, at least 60 amino acids, at least 80 amino acids, at least 100 amino acids, at least 120 amino acids, at least 140 amino acids, at least 160 amino acids, at least 180 amino acids, at least 200 amino acids, at least 220 amino acids, at least 240 amino acids, at least 260 amino acids, at least 300 amino acids, or at least 350 amino acids may be truncated at the N-terminus of the Cas13 effector. For example, at least 200 amino acids may be truncated at the C-terminus of the Cas13 effector, and at least 20 amino acids, at least 40 amino acids, at least 60 amino acids, at least 80 amino acids, at least 100 amino acids, at least 120 amino acids, at least 140 amino acids, at least 160 amino acids, at least 180 amino acids, at least 200 amino acids, at least 220 amino acids, at least 240 amino acids, at least 260 amino acids, at least 300 amino acids, or at least 350 amino acids may be truncated at the N-terminus of the Cas13 effector. For example, at least 220 amino acids may be truncated at the C-terminus of the Cas13 effector, and at least 20 amino acids, at least 40 amino acids, at least 60 amino acids, at least 80 amino acids, at least 100 amino acids, at least 120 amino acids, at least 140 amino acids, at least 160 amino acids, at least 180 amino acids, at least 200 amino acids, at least 220 amino acids, at least 240 amino acids, at least 260 amino acids, at least 300 amino acids, or at least 350 amino acids may be truncated at the N-terminus of the Cas13 effector. For example, at least 240 amino acids may be truncated at the C-terminus of the Cas13 effector, and at least 20 amino acids, at least 40 amino acids, at least 60 amino acids, at least 80 amino acids, at least 100 amino acids, at least 120 amino acids, at least 140 amino acids, at least 160 amino acids, at least 180 amino acids, at least 200 amino acids, at least 220 amino acids, at least 240 amino acids, at least 260 amino acids, at least 300 amino acids, or at least 350 amino acids may be truncated at the N-terminus of the Cas13 effector. For example, at least 260 amino acids may be truncated at the C-terminus of the Cas13 effector, and at least 20 amino acids, at least 40 amino acids, at least 60 amino acids, at least 80 amino acids, at least 100 amino acids, at least 120 amino acids, at least 140 amino acids, at least 160 amino acids, at least 180 amino acids, at least 200 amino acids, at least 220 amino acids, at least 240 amino acids, at least 260 amino acids, at least 300 amino acids, or at least 350 amino acids may be truncated at the N-terminus of the Cas13 effector. For example, at least 280 amino acids may be truncated at the C-terminus of the Cas13 effector, and at least 20 amino acids, at least 40 amino acids, at least 60 amino acids, at least 80 amino acids, at least 100 amino acids, at least 120 amino acids, at least 140 amino acids, at least 160 amino acids, at least 180 amino acids, at least 200 amino acids, at least 220 amino acids, at least 240 amino acids, at least 260 amino acids, at least 300 amino acids, or at least 350 amino acids may be truncated at the N-terminus of the Cas13 effector. For example, at least 300 amino acids may be truncated at the C-terminus of the Cas13 effector, and at least 20 amino acids, at least 40 amino acids, at least 60 amino acids, at least 80 amino acids, at least 100 amino acids, at least 120 amino acids, at least 140 amino acids, at least 160 amino acids, at least 180 amino acids, at least 200 amino acids, at least 220 amino acids, at least 240 amino acids, at least 260 amino acids, at least 300 amino acids, or at least 350 amino acids may be truncated at the N-terminus of the Cas13 effector. For example, at least 350 amino acids may be truncated at the C-terminus of the Cas13 effector, and at least 20 amino acids, at least 40 amino acids, at least 60 amino acids, at least 80 amino acids, at least 100 amino acids, at least 120 amino acids, at least 140 amino acids, at least 160 amino acids, at least 180 amino acids, at least 200 amino acids, at least 220 amino acids, at least 240 amino acids, at least 260 amino acids, at least 300 amino acids, or at least 350 amino acids may be truncated at the N-terminus of the Cas13 effector. For example, at least 20 amino acids may be truncated at the N-terminus of the Cas13 effector, and at least 20 amino acids, at least 40 amino acids, at least 60 amino acids, at least 80 amino acids, at least 100 amino acids, at least 120 amino acids, at least 140 amino acids, at least 160 amino acids, at least 180 amino acids, at least 200 amino acids, at least 220 amino acids, at least 240 amino acids, at least 260 amino acids, at least 300 amino acids, or at least 350 amino acids may be truncated at the C-terminus of the Cas13 effector. For example, at least 40 amino acids may be truncated at the N-terminus of the Cas13 effector, and at least 20 amino acids, at least 40 amino acids, at least 60 amino acids, at least 80 amino acids, at least 100 amino acids, at least 120 amino acids, at least 140 amino acids, at least 160 amino acids, at least 180 amino acids, at least 200 amino acids, at least 220 amino acids, at least 240 amino acids, at least 260 amino acids, at least 300 amino acids, or at least 350 amino acids may be truncated at the C-terminus of the Cas13 effector. For example, at least 60 amino acids may be truncated at the N-terminus of the Cas13 effector, and at least 20 amino acids, at least 40 amino acids, at least 60 amino acids, at least 80 amino acids, at least 100 amino acids, at least 120 amino acids, at least 140 amino acids, at least 160 amino acids, at least 180 amino acids, at least 200 amino acids, at least 220 amino acids, at least 240 amino acids, at least 260 amino acids, at least 300 amino acids, or at least 350 amino acids may be truncated at the C-terminus of the Cas13 effector. For example, at least 80 amino acids may be truncated at the N-terminus of the Cas13 effector, and at least 20 amino acids, at least 40 amino acids, at least 60 amino acids, at least 80 amino acids, at least 100 amino acids, at least 120 amino acids, at least 140 amino acids, at least 160 amino acids, at least 180 amino acids, at least 200 amino acids, at least 220 amino acids, at least 240 amino acids, at least 260 amino acids, at least 300 amino acids, or at least 350 amino acids may be truncated at the C-terminus of the Cas13 effector. For example, at least 100 amino acids may be truncated at the N-terminus of the Cas13 effector, and at least 20 amino acids, at least 40 amino acids, at least 60 amino acids, at least 80 amino acids, at least 100 amino acids, at least 120 amino acids, at least 140 amino acids, at least 160 amino acids, at least 180 amino acids, at least 200 amino acids, at least 220 amino acids, at least 240 amino acids, at least 260 amino acids, at least 300 amino acids, or at least 350 amino acids may be truncated at the C-terminus of the Cas13 effector. For example, at least 120 amino acids may be truncated at the N-terminus of the Cas13 effector, and at least 20 amino acids, at least 40 amino acids, at least 60 amino acids, at least 80 amino acids, at least 100 amino acids, at least 120 amino acids, at least 140 amino acids, at least 160 amino acids, at least 180 amino acids, at least 200 amino acids, at least 220 amino acids, at least 240 amino acids, at least 260 amino acids, at least 300 amino acids, or at least 350 amino acids may be truncated at the C-terminus of the Cas13 effector. For example, at least 140 amino acids may be truncated at the N-terminus of the Cas13 effector, and at least 20 amino acids, at least 40 amino acids, at least 60 amino acids, at least 80 amino acids, at least 100 amino acids, at least 120 amino acids, at least 140 amino acids, at least 160 amino acids, at least 180 amino acids, at least 200 amino acids, at least 220 amino acids, at least 240 amino acids, at least 260 amino acids, at least 300 amino acids, or at least 350 amino acids may be truncated at the C-terminus of the Cas13 effector. For example, at least 160 amino acids may be truncated at the N-terminus of the Cas13 effector, and at least 20 amino acids, at least 40 amino acids, at least 60 amino acids, at least 80 amino acids, at least 100 amino acids, at least 120 amino acids, at least 140 amino acids, at least 160 amino acids, at least 180 amino acids, at least 200 amino acids, at least 220 amino acids, at least 240 amino acids, at least 260 amino acids, at least 300 amino acids, or at least 350 amino acids may be truncated at the C-terminus of the Cas13 effector. For example, at least 180 amino acids may be truncated at the N-terminus of the Cas13 effector, and at least 20 amino acids, at least 40 amino acids, at least 60 amino acids, at least 80 amino acids, at least 100 amino acids, at least 120 amino acids, at least 140 amino acids, at least 160 amino acids, at least 180 amino acids, at least 200 amino acids, at least 220 amino acids, at least 240 amino acids, at least 260 amino acids, at least 300 amino acids, or at least 350 amino acids may be truncated at the C-terminus of the Cas13 effector. For example, at least 200 amino acids may be truncated at the N-terminus of the Cas13 effector, and at least 20 amino acids, at least 40 amino acids, at least 60 amino acids, at least 80 amino acids, at least 100 amino acids, at least 120 amino acids, at least 140 amino acids, at least 160 amino acids, at least 180 amino acids, at least 200 amino acids, at least 220 amino acids, at least 240 amino acids, at least 260 amino acids, at least 300 amino acids, or at least 350 amino acids may be truncated at the C-terminus of the Cas13 effector. For example, at least 220 amino acids may be truncated at the N-terminus of the Cas13 effector, and at least 20 amino acids, at least 40 amino acids, at least 60 amino acids, at least 80 amino acids, at least 100 amino acids, at least 120 amino acids, at least 140 amino acids, at least 160 amino acids, at least 180 amino acids, at least 200 amino acids, at least 220 amino acids, at least 240 amino acids, at least 260 amino acids, at least 300 amino acids, or at least 350 amino acids may be truncated at the C-terminus of the Cas13 effector. For example, at least 240 amino acids may be truncated at the N-terminus of the Cas13 effector, and at least 20 amino acids, at least 40 amino acids, at least 60 amino acids, at least 80 amino acids, at least 100 amino acids, at least 120 amino acids, at least 140 amino acids, at least 160 amino acids, at least 180 amino acids, at least 200 amino acids, at least 220 amino acids, at least 240 amino acids, at least 260 amino acids, at least 300 amino acids, or at least 350 amino acids may be truncated at the C-terminus of the Cas13 effector. For example, at least 260 amino acids may be truncated at the N-terminus of the Cas13 effector, and at least 20 amino acids, at least 40 amino acids, at least 60 amino acids, at least 80 amino acids, at least 100 amino acids, at least 120 amino acids, at least 140 amino acids, at least 160 amino acids, at least 180 amino acids, at least 200 amino acids, at least 220 amino acids, at least 240 amino acids, at least 260 amino acids, at least 300 amino acids, or at least 350 amino acids may be truncated at the C-terminus of the Cas13 effector. For example, at least 280 amino acids may be truncated at the N-terminus of the Cas13 effector, and at least 20 amino acids, at least 40 amino acids, at least 60 amino acids, at least 80 amino acids, at least 100 amino acids, at least 120 amino acids, at least 140 amino acids, at least 160 amino acids, at least 180 amino acids, at least 200 amino acids, at least 220 amino acids, at least 240 amino acids, at least 260 amino acids, at least 300 amino acids, or at least 350 amino acids may be truncated at the C-terminus of the Cas13 effector. For example, at least 300 amino acids may be truncated at the N-terminus of the Cas13 effector, and at least 20 amino acids, at least 40 amino acids, at least 60 amino acids, at least 80 amino acids, at least 100 amino acids, at least 120 amino acids, at least 140 amino acids, at least 160 amino acids, at least 180 amino acids, at least 200 amino acids, at least 220 amino acids, at least 240 amino acids, at least 260 amino acids, at least 300 amino acids, or at least 350 amino acids may be truncated at the C-terminus of the Cas13 effector. For example, at least 350 amino acids may be truncated at the N-terminus of the Cas13 effector, and at least 20 amino acids, at least 40 amino acids, at least 60 amino acids, at least 80 amino acids, at least 100 amino acids, at least 120 amino acids, at least 140 amino acids, at least 160 amino acids, at least 180 amino acids, at least 200 amino acids, at least 220 amino acids, at least 240 amino acids, at least 260 amino acids, at least 300 amino acids, or at least 350 amino acids may be truncated at the C-terminus of the Cas13 effector.

[0183] The additional modifications of the CRISPR-Cas protein may or may not cause an altered functionality. By means of example, and in particular with reference to CRISPR-Cas protein, modifications which do not result in an altered functionality include for instance codon optimization for expression into a particular host, or providing the nuclease with a particular marker (e.g. for visualization). Modifications with may result in altered functionality may also include mutations, including point mutations, insertions, deletions, truncations (including split nucleases), etc. Fusion proteins may without limitation include for instance fusions with heterologous domains or functional domains (e.g. localization signals, catalytic domains, etc.). In certain embodiments, various different modifications may be combined (e.g. a mutated nuclease which is catalytically inactive and which further is fused to a functional domain, such as for instance to induce DNA methylation or another nucleic acid modification, such as including without limitation a break (e.g. by a different nuclease (domain)), a mutation, a deletion, an insertion, a replacement, a ligation, a digestion, a break or a recombination). As used herein, “altered functionality” includes without limitation an altered specificity (e.g. altered target recognition, increased (e.g. “enhanced” Cas proteins) or decreased specificity, or altered PAM recognition), altered activity (e.g. increased or decreased catalytic activity, including catalytically inactive nucleases or nickases), and/or altered stability (e.g. fusions with destabilization domains). Suitable heterologous domains include without limitation a nuclease, a ligase, a repair protein, a methyltransferase, (viral) integrase, a recombinase, a transposase, an argonaute, a cytidine deaminase, a retron, a group II intron, a phosphatase, a phosphorylase, a sulpfurylase, a kinase, a polymerase, an exonuclease, etc. Examples of all these modifications are known in the art. It will be understood that a “modified” nuclease as referred to herein, and in particular a “modified” Cas or “modified” CRISPR-Cas system or complex preferably still has the capacity to interact with or bind to the polynucleic acid (e.g. in complex with the guide molecule). Such modified Cas protein can be combined with the deaminase protein or active domain thereof as described herein.

[0184] In certain embodiments, CRISPR-Cas protein may comprise one or more modifications resulting in enhanced activity and/or specificity, such as including mutating residues that stabilize the targeted or non-targeted strand (e.g. eCas9; “Rationally engineered Cas9 nucleases with improved specificity”, Slaymaker et al. (2016), Science, 351(6268):84-88, incorporated herewith in its entirety by reference). In certain embodiments, the altered or modified activity of the engineered CRISPR protein comprises increased targeting efficiency or decreased off-target binding. In certain embodiments, the altered activity of the engineered CRISPR protein comprises modified cleavage activity. In certain embodiments, the altered activity comprises increased cleavage activity as to the target polynucleotide loci. In certain embodiments, the altered activity comprises decreased cleavage activity as to the target polynucleotide loci. In certain embodiments, the altered activity comprises decreased cleavage activity as to off-target polynucleotide loci. In certain embodiments, the altered or modified activity of the modified nuclease comprises altered helicase kinetics. In certain embodiments, the modified nuclease comprises a modification that alters association of the protein with the nucleic acid molecule comprising RNA (in the case of a Cas protein), or a strand of the target polynucleotide loci, or a strand of off-target polynucleotide loci. In an aspect of the invention, the engineered CRISPR protein comprises a modification that alters formation of the CRISPR complex. In certain embodiments, the altered activity comprises increased cleavage activity as to off-target polynucleotide loci. Accordingly, in certain embodiments, there is increased specificity for target polynucleotide loci as compared to off-target polynucleotide loci. In other embodiments, there is reduced specificity for target polynucleotide loci as compared to off-target polynucleotide loci. In certain embodiments, the mutations result in decreased off-target effects (e.g. cleavage or binding properties, activity, or kinetics), such as in case for Cas proteins for instance resulting in a lower tolerance for mismatches between target and guide RNA. Other mutations may lead to increased off-target effects (e.g. cleavage or binding properties, activity, or kinetics). Other mutations may lead to increased or decreased on-target effects (e.g. cleavage or binding properties, activity, or kinetics). In certain embodiments, the mutations result in altered (e.g. increased or decreased) helicase activity, association or formation of the functional nuclease complex (e.g. CRISPR-Cas complex). In certain embodiments, as described above, the mutations result in an altered PAM recognition, i.e. a different PAM may be (in addition or in the alternative) be recognized, compared to the unmodified Cas protein. Particularly preferred mutations include positively charged residues and/or (evolutionary) conserved residues, such as conserved positively charged residues, in order to enhance specificity. In certain embodiments, such residues may be mutated to uncharged residues, such as alanine.

### Type-V CRISPR-Cas Protein

[0185] The application describes methods using Type-V CRISPR-Cas proteins. This is exemplified herein with Cas13, whereby a number of orthologs or homologs have been identified. For example, Cas13 may be Cas13a, Cas13b, or Cas13c. It will be apparent to the skilled person that further orthologs or homologs can be identified and that any of the functionalities described herein may be engineered into other orthologs, including chimeric enzymes comprising fragments from multiple orthologs.

[0186] Computational methods of identifying novel CRISPR-Cas loci are described in EP3009511 or US2016208243 and may comprise the following steps: detecting all contigs encoding the Cas1 protein; identifying all predicted protein coding genes within 20 kB of the cas1 gene; comparing the identified genes with Cas protein-specific profiles and predicting CRISPR arrays; selecting unclassified candidate CRISPR-Cas loci containing proteins larger than 500 amino acids (>500 aa); analyzing selected candidates using methods such as PSI-BLAST and HHPred to screen for known protein domains, thereby identifying novel Class 2 CRISPR-Cas loci (see also Schmakov et al. 2015, Mol Cell. 60(3):385-97). In addition to the above mentioned steps, additional analysis of the candidates may be conducted by searching metagenomics databases for additional homologs. Additionally or alternatively, to expand the search to non-autonomous CRISPR-Cas systems, the same procedure can be performed with the CRISPR array used as the seed.

[0187] In one aspect the detecting all contigs encoding the Cas1 protein is performed by GenemarkS which a gene prediction program as further described in “GeneMarkS: a self-training method for prediction of gene starts in microbial genomes. Implications for finding sequence motifs in regulatory regions.” John Besemer, Alexandre Lomsadze and Mark Borodovsky, Nucleic Acids Research (2001) 29, pp 2607-2618, herein incorporated by reference.

[0188] In one aspect the identifying all predicted protein coding genes is carried out by comparing the identified genes with Cas protein-specific profiles and annotating them according to NCBI Conserved Domain Database (CDD) which is a protein annotation resource that consists of a collection of well-annotated multiple sequence alignment models for ancient domains and full-length proteins. These are available as position-specific score matrices (PSSMs) for fast identification of conserved domains in protein sequences via RPS-BLAST. CDD content includes NCBI-curated domains, which use 3D-structure information to explicitly define domain boundaries and provide insights into sequence/structure/function relationships, as well as domain models imported from a number of external source databases (Pfam, SMART, COG, PRK, TIGRFAM). In a further aspect, CRISPR arrays were predicted using a PILER-CR program which is a public domain software for finding CRISPR repeats as described in “PILER-CR: fast and accurate identification of CRISPR repeats”, Edgar, R.C., BMC Bioinformatics, January 20; 8:18(2007), herein incorporated by reference.

[0189] In a further aspect, the case by case analysis is performed using PSI-BLAST (Position-Specific Iterative Basic Local Alignment Search Tool). PSI-BLAST derives a position-specific scoring matrix (PSSM) or profile from the multiple sequence alignment of sequences detected above a given score threshold using protein-protein BLAST. This PSSM is used to further search the database for new matches, and is updated for subsequent iterations with these newly detected sequences. Thus, PSI-BLAST provides a means of detecting distant relationships between proteins.

[0190] In another aspect, the case by case analysis is performed using HHpred, a method for sequence database searching and structure prediction that is as easy to use as BLAST or PSI-BLAST and that is at the same time much more sensitive in finding remote homologs. In fact, HHpred's sensitivity is competitive with the most powerful servers for structure prediction currently available. HHpred is the first server that is based on the pairwise comparison of profile hidden Markov models (HMMs). Whereas most conventional sequence search methods search sequence databases such as UniProt or the NR, HHpred searches alignment databases, like Pfam or SMART. This greatly simplifies the list of hits to a number of sequence families instead of a clutter of single sequences. All major publicly available profile and alignment databases are available through HHpred. HHpred accepts a single query sequence or a multiple alignment as input. Within only a few minutes it returns the search results in an easy-to-read format similar to that of PSI-BLAST. Search options include local or global alignment and scoring secondary structure similarity. HHpred can produce pairwise query-template sequence alignments, merged query-template multiple alignments (e.g. for transitive searches), as well as 3D structural models calculated by the MODELLER software from HHpred alignments.

### Deactivated/Inactivated Cas13 Protein

[0191] The systems herein may comprise catalytically inactive (dead) Cas protein, e.g., catalytically inactive Cas13 protein. Where the Cas13 protein has nuclease activity, the Cas13 protein may be modified to have diminished nuclease activity e.g., nuclease inactivation of at least 70%, at least 80%, at least 90%, at least 95%, at least 97%, or 100% as compared with the wild type enzyme; or to put in another way, a Cas13 enzyme having advantageously about 0% of the nuclease activity of the non-mutated or wild type Cas13 enzyme or CRISPR-Cas protein, or no more than about 3% or about 5% or about 10% of the nuclease activity of the non-mutated or wild type Cas13 enzyme, e.g. of the non-mutated or wild type Francisella novicida U112 (FnCas13), Acidaminococcus sp. BV3L6 (AsCas13), Lachnospiraceae bacterium ND2006 (LbCas13) or Moraxella bovoculi 237 (MbCas13 Cas13 enzyme or CRISPR-Cas protein. This is possible by introducing mutations into the nuclease domains of the Cas13 and orthologs thereof.

[0192] In some embodiments, a catalytically inactive Cas protein may have nickase activity. In preferred embodiments of the present invention at least one Cas13 protein is used which is a Cas13 nickase. More particularly, a Cas13 nickase is used which does not cleave the target strand but is capable of cleaving only the strand which is complementary to the target strand, i.e. the non-target DNA strand also referred to herein as the strand which is not complementary to the guide sequence. More particularly the Cas13 nickase is a Cas13 protein which comprises a mutation in the arginine at position 1226A in the Nuc domain of Cas13 from Acidaminococcus sp., or a corresponding position in a Cas13 ortholog. In further particular embodiments, the enzyme comprises an arginine-to-alanine substitution or an R1226A mutation. It will be understood by the skilled person that where the enzyme is not AsCas13, a mutation may be made at a residue in a corresponding position. In particular embodiments, the Cas13 is FnCas13 and the mutation is at the arginine at position R1218. In particular embodiments, the Cas13 is LbCas13 and the mutation is at the arginine at position R1138. In particular embodiments, the Cas13 is MbCas13 and the mutation is at the arginine at position R1293.

### Cas13 Mutants

[0193] In certain embodiments, use is made additionally or alternatively of a CRISPR-Cas protein which is engineered and can comprise one or more mutations that reduce or eliminate a nuclease activity. The amino acid positions in the FnCas13p RuvC domain include but are not limited to D917A, E1006A, E1028A, D1227A, D1255A, N1257A, D917A, E1006A, E1028A, D1227A, D1255A and N1257A. Applicants have also identified a putative second nuclease domain which is most similar to PD-(D/E)XK nuclease superfamily and HincII endonuclease like. The point mutations to be generated in this putative nuclease domain to substantially reduce nuclease activity include but are not limited to N580A, N584A, T587A, W609A, D610A, K613A, E614A, D616A, K624A, D625A, K627A and Y629A. In a preferred embodiment, the mutation in the FnCas13p RuvC domain is D917A or E1006A, wherein the D917A or E1006A mutation completely inactivates the DNA cleavage activity of the FnCas13 effector protein. In another embodiment, the mutation in the FnCas13p RuvC domain is D1255A, wherein the mutated FnCas13 effector protein has significantly reduced nucleolytic activity.

[0194] More particularly, the inactivated Cas13 enzymes include enzymes mutated in amino acid positions As908, As993, As1263 of AsCas13 or corresponding positions in Cas13 orthologs. Additionally, the inactivated Cas13 enzymes include enzymes mutated in amino acid position Lb832, 925, 947 or 1180 of LbCas13 or corresponding positions in Cas13 orthologs. More particularly, the inactivated Cas13 enzymes include enzymes comprising one or more of mutations AsD908A, AsE993A, AsD1263A of AsCas13 or corresponding mutations in Cas13 orthologs. Additionally, the inactivated Cas13 enzymes include enzymes comprising one or more of mutations LbD832A, E925A, D947A or D1180A of LbCas13 or corresponding mutations in Cas13 orthologs.

[0195] Mutations can also be made at neighboring residues, e.g., at amino acids near those indicated above that participate in the nuclease activity. In some embodiments, only the RuvC domain is inactivated, and in other embodiments, another putative nuclease domain is inactivated, wherein the effector protein complex functions as a nickase and cleaves only one DNA strand. In a preferred embodiment, the other putative nuclease domain is a HincII-like endonuclease domain.

[0196] The inactivated Cas13 or Cas13 nickase may have associated (e.g., via fusion protein) one or more functional domains, including for example, an nucleotide deaminase or catalytic domain thereof. In some cases it is advantageous that additionally at least one heterologous NLS is provided. In some instances, it is advantageous to position the NLS at the N terminus. In general, the positioning of the one or more functional domain on the inactivated Cas13 or Cas13 nickase is one which allows for correct spatial orientation for the functional domain to affect the target with the attributed functional effect. For example, when the functional domain is an nucleotide deaminase catalytic domain thereof, the nucleotide deaminase catalytic domain is placed in a spatial orientation which allows it to contact and deaminate a target adenine. This may include positions other than the N-/C-terminus of Cas13. In some embodiments, the nucleotide deaminase protein or catalytic domain thereof is inserted into an internal loop of the dead Cas13.

### Use of Orthogonal Catalytically Inactive CRISPR-Cas Proteins

[0197] In particular embodiments, the Cas13 nickase is used in combination with an orthogonal catalytically inactive CRISPR-Cas protein to increase efficiency of said Cas13 nickase (as described in Chen et al. 2017, Nature Communications 8:14958; doi:10.1038/ncomms14958). More particularly, the orthogonal catalytically inactive CRISPR-Cas protein is characterized by a different PAM recognition site than the Cas13 nickase used in the AD-functionalized CRISPR system and the corresponding guide sequence is selected to bind to a target sequence proximal to that of the Cas13 nickase of the AD-functionalized CRISPR system. The orthogonal catalytically inactive CRISPR-Cas protein as used in the context of the present invention does not form part of the AD-functionalized CRISPR system but merely functions to increase the efficiency of said Cas13 nickase and is used in combination with a standard guide molecule as described in the art for said CRISPR-Cas protein. In particular embodiments, said orthogonal catalytically inactive CRISPR-Cas protein is a dead CRISPR-Cas protein, i.e. comprising one or more mutations which abolishes the nuclease activity of said CRISPR-Cas protein. In particular embodiments, the catalytically inactive orthogonal CRISPR-Cas protein is provided with two or more guide molecules which are capable of hybridizing to target sequences which are proximal to the target sequence of the Cas13 nickase. In particular embodiments, at least two guide molecules are used to target said catalytically inactive CRISPR-Cas protein, of which at least one guide molecule is capable of hybridizing to a target sequence 5″ of the target sequence of the Cas13 nickase and at least one guide molecule is capable of hybridizing to a target sequence 3′ of the target sequence of the Cas13 nickase of the AD-functionalized CRISPR system, whereby said one or more target sequences may be on the same or the opposite DNA strand as the target sequence of the Cas13 nickase. In particular embodiments, the guide sequences for the one or more guide molecules of the orthogonal catalytically inactive CRISPR-Cas protein are selected such that the target sequences are proximal to that of the guide molecule for the targeting of the AD-functionalized CRISPR, i.e. for the targeting of the Cas13 nickase. In particular embodiments, the one or more target sequences of the orthogonal catalytically inactive CRISPR-Cas enzyme are each separated from the target sequence of the Cas13 nickase by more than 5 but less than 450 base pairs. Optimal distances between the target sequences of the guides for use with the orthogonal catalytically inactive CRISPR-Cas protein and the target sequence of the AD-functionalized CRISPR system can be determined by the skilled person. In particular embodiments, the orthogonal CRISPR-Cas protein is a Class II, type II CRISPR protein. In particular embodiments, the orthogonal CRISPR-Cas protein is a Class II, type V CRISPR protein. In particular embodiments, the catalytically inactive orthogonal CRISPR-Cas protein In particular embodiments, the catalytically inactive orthogonal CRISPR-Cas protein has been modified to alter its PAM specificity as described elsewhere herein. In particular embodiments, the Cas13 protein nickase is a nickase which, by itself has limited activity in human cells, but which, in combination with an inactive orthogonal CRISPR-Cas protein and one or more corresponding proximal guides ensures the required nickase activity.

[0198] In some embodiments, the Cas13 protein is a Cas13a protein and the Cas13a comprises one or more mutations in the two HEPN domains, for example, at positions R474 and R1046 of Cas13a protein originating from Leptotrichia wadei or amino acid positions corresponding thereto of a Cas13a ortholog.

In some embodiments, the Cas13 protein is a Cas13b protein and the Cas13b comprises a mutation in one or more of positions R116, H121, R1177, and H1182, e.g., R116A, H121A, R1177A, and H1182A of Cas13b protein originating from Bergeyella zoohelcum ATCC 43767 or amino acid positions corresponding thereto of a Cas13b ortholog, In certain embodiments, the Cas13b comprises a mutation in one or more of positions R128, H133, R1053, and H1058, preferably H133 and H1058, preferably H133A and H1058A, of a Cas13b protein originating from Prevotella sp. P5-125 or amino acid positions corresponding thereto of a Cas13b ortholog.

### Modified Cas13 Enzymes

[0199] In particular embodiments, it is of interest to make use of an engineered Cas13 protein as defined herein, such as Cas13, wherein the protein complexes with a nucleic acid molecule comprising RNA to form a CRISPR complex, wherein when in the CRISPR complex, the nucleic acid molecule targets one or more target polynucleotide loci, the protein comprises at least one modification compared to unmodified Cas13 protein, and wherein the CRISPR complex comprising the modified protein has altered activity as compared to the complex comprising the unmodified Cas13 protein. It is to be understood that when referring herein to CRISPR “protein”, the Cas13 protein preferably is a modified CRISPR-Cas protein (e.g. having increased or decreased (or no) enzymatic activity, such as without limitation including Cas13. The term “CRISPR protein” may be used interchangeably with “CRISPR-Cas protein”, irrespective of whether the CRISPR protein has altered, such as increased or decreased (or no) enzymatic activity, compared to the wild type CRISPR protein.

[0200] Computational analysis of the primary structure of Cas13 nucleases reveals three distinct regions. First a C-terminal RuvC like domain, which is the only functional characterized domain. Second a N-terminal alpha-helical region and thirst a mixed alpha and beta region, located between the RuvC like domain and the alpha-helical region.

[0201] Several small stretches of unstructured regions are predicted within the Cas13 primary structure. Unstructured regions, which are exposed to the solvent and not conserved within different Cas13 orthologs, are preferred sides for splits and insertions of small protein sequences. In addition, these sides can be used to generate chimeric proteins between Cas13 orthologs.

[0202] Based on the above information, mutants can be generated which lead to inactivation of the enzyme or which modify the double strand nuclease to nickase activity. In alternative embodiments, this information is used to develop enzymes with reduced off-target effects (described elsewhere herein)

[0203] In certain of the above-described Cas13 enzymes, the enzyme is modified by mutation of one or more residues (in the RuvC domain) including but not limited to positions R909, R912, R930, R947, K949, R951, R955, K965, K968, K1000, K1002, R1003, K1009, K1017, K1022, K1029, K1035, K1054, K1072, K1086, R1094, K1095, K1109, K1118, K1142, K1150, K1158, K1159, R1220, R1226, R1242, and/or R1252 with reference to amino acid position numbering of AsCas13 (Acidaminococcus sp. BV3L6). In certain embodiments, the Cas13 enzymes comprising said one or more mutations have modified, more preferably increased specificity for the target.

[0204] In certain of the above-described non-naturally-occurring CRISPR-Cas proteins, the enzyme is modified by mutation of one or more residues (in the RAD50) domain including but not limited positions K324, K335, K337, R331, K369, K370, R386, R392, R393, K400, K404, K406, K408, K414, K429, K436, K438, K459, K460, K464, R670, K675, R681, K686, K689, R699, K705, R725, K729, K739, K748, and/or K752 with reference to amino acid position numbering of AsCas13 (Acidaminococcus sp. BV3L6). In certain embodiments, the Cas13 enzymes comprising said one or more mutations have modified, more preferably increased specificity for the target.

[0205] In certain of the Cas13 enzymes, the enzyme is modified by mutation of one or more residues including but not limited positions R912, T923, R947, K949, R951, R955, K965, K968, K1000, R1003, K1009, K1017, K1022, K1029, K1072, K1086, F1103, R1226, and/or R1252 with reference to amino acid position numbering of AsCas13 (Acidaminococcus sp. BV3L6). In certain embodiments, the Cas13 enzymes comprising said one or more mutations have modified, more preferably increased specificity for the target.

[0206] In certain embodiments, the Cas13 enzyme is modified by mutation of one or more residues including but not limited positions R833, R836, K847, K879, K881, R883, R887, K897, K900, K932, R935, K940, K948, K953, K960, K984, K1003, K1017, R1033, R1138, R1165, and/or R1252 with reference to amino acid position numbering of LbCas13 (Lachnospiraceae bacterium ND2006). In certain embodiments, the Cas13 enzymes comprising said one or more mutations have modified, more preferably increased specificity for the target.

[0207] In certain embodiments, the Cas13 enzyme is modified by mutation of one or more residues including but not limited positions K15, R18, K26, Q34, R43, K48, K51, R56, R84, K85, K87, N93, R103, N104, T118, K123, K134, R176, K177, R192, K200, K226, K273, K275, T291, R301, K307, K369, 5404, V409, K414, K436, K438, K468, D482, K516, R518, K524, K530, K532, K548, K559, K570, R574, K592, D596, K603, K607, K613, C647, R681, K686, H720, K739, K748, K757, T766, K780, R790, P791, K796, K809, K815, T816, K860, R862, R863, K868, K897, R909, R912, T923, R947, K949, R951, R955, K965, K968, K1000, R1003, K1009, K1017, K1022, K1029, A1053, K1072, K1086, F1103, 51209, R1226, R1252, K1273, K1282, and/or K1288 with reference to amino acid position numbering of AsCas13 (Acidaminococcus sp. BV3L6). In certain embodiments, the Cas13 enzymes comprising said one or more mutations have modified, more preferably increased specificity for the target.

[0208] In certain embodiments, the enzyme is modified by mutation of one or more residues including but not limited positions K15, R18, K26, R34, R43, K48, K51, K56, K87, K88, D90, K96, K106, K107, K120, Q125, K143, R186, K187, R202, K210, K235, K296, K298, K314, K320, K326, K397, K444, K449, E454, A483, E491, K527, K541, K581, R583, K589, K595, K597, K613, K624, K635, K639, K656, K660, K667, K671, K677, K719, K725, K730, K763, K782, K791, R800, K809, K823, R833, K834, K839, K852, K858, K859, K869, K871, R872, K877, K905, R918, R921, K932, 1960, K962, R964, R968, K978, K981, K1013, R1016, K1021, K1029, K1034, K1041, K1065, K1084, and/or K1098 with reference to amino acid position numbering of FnCas13 (Francisella novicida U112). In certain embodiments, the Cas13 enzymes comprising said one or more mutations have modified, more preferably increased specificity for the target.

[0209] In certain embodiments, the enzyme is modified by mutation of one or more residues including but not limited positions K15, R18, K26, K34, R43, K48, K51, R56, K83, K84, R86, K92, R102, K103, K116, K121, R158, E159, R174, R182, K206, K251, K253, K269, K271, K278, P342, K380, R385, K390, K415, K421, K457, K471, A506, R508, K514, K520, K522, K538, Y548, K560, K564, K580, K584, K591, K595, K601, K634, K640, R645, K679, K689, K707, T716, K725, R737, R747, R748, K753, K768, K774, K775, K785, K787, R788, Q793, K821, R833, R836, K847, K879, K881, R883, R887, K897, K900, K932, R935, K940, K948, K953, K960, K984, K1003, K1017, R1033, K1121, R1138, R1165, K1190, K1199, and/or K1208 with reference to amino acid position numbering of LbCas13 (Lachnospiraceae bacterium ND2006). In certain embodiments, the Cas13 enzymes comprising said one or more mutations have modified, more preferably increased specificity for the target.

[0210] In certain embodiments, the enzyme is modified by mutation of one or more residues including but not limited positions K14, R17, R25, K33, M42, Q47, K50, D55, K85, N86, K88, K94, R104, K105, K118, K123, K131, R174, K175, R190, R198, I221, K267, Q269, K285, K291, K297, K357, K403, K409, K414, K448, K460, K501, K515, K550, R552, K558, K564, K566, K582, K593, K604, K608, K623, K627, K633, K637, E643, K780, Y787, K792, K830, Q846, K858, K867, K876, K890, R900, K901, M906, K921, K927, K928, K937, K939, R940, K945, Q975, R987, R990, K1001, R1034, 11036, R1038, R1042, K1052, K1055, K1087, R1090, K1095, N1103, K1108, K1115, K1139, K1158, R1172, K1188, K1276, R1293, A1319, K1340, K1349, and/or K1356 with reference to amino acid position numbering of MbCas13 (Moraxella bovoculi 237). In certain embodiments, the Cas13 enzymes comprising said one or more mutations have modified, more preferably increased specificity for the target.

[0211] In one embodiment, the Cas13 protein is modified with a mutation at 51228 (e.g., S1228A) with reference to amino acid position numbering of AsCas13. See Yamano et al., Cell 165:949-962 (2016), which is incorporated herein by reference in its entirety.

[0212] In certain embodiments, the Cas13 protein has been modified to recognize a non-natural PAM, such as recognizing a PAM having a sequence or comprising a sequence YCN, YCV, AYV, TYV, RYN, RCN, TGYV, NTTN, TTN, TRTN, TYTV, TYCT, TYCN, TRTN, NTTN, TACT, TYCC, TRTC, TATV, NTTV, TTV, TSTG, TVTS, TYYS, TCYS, TBYS, TCYS, TNYS, TYYS, TNTN, TSTG, TTCC, TCCC, TATC, TGTG, TCTG, TYCV, or TCTC. In particular embodiments, said mutated Cas13 comprises one or more mutated amino acid residue at position 11, 12, 13, 14, 15, 16, 17, 34, 36, 39, 40, 43, 46, 47, 50, 54, 57, 58, 111, 126, 127, 128, 129, 130, 131, 132, 133, 134, 135, 136, 157, 158, 159, 160, 161, 162, 163, 164, 165, 166, 167, 168, 169, 170, 171, 172, 173, 174, 175, 176, 177, 178, 532, 533, 534, 535, 536, 537, 538, 539, 540, 541, 542, 543, 544, 545, 546, 547, 548, 549, 550, 551, 552, 553, 554, 555, 556, 565, 566, 567, 568, 569, 570, 571, 572, 573, 574, 575, 592, 593, 594, 595, 596, 597, 598, 599, 600, 601, 602, 603, 604, 605, 606, 607, 608, 609, 610, 611, 612, 613, 614, 615, 616, 617, 618, 619, 620, 626, 627, 628, 629, 630, 631, 632, 633, 634, 635, 636, 637, 638, 642, 643, 644, 645, 646, 647, 648, 649, 651, 652, 653, 654, 655, 656, 676, 679, 680, 682, 683, 684, 685, 686, 687, 688, 689, 690, 691, 692, 693, 707, 711, 714, 715, 716, 717, 718, 719, 720, 721, 722, 739, 765, 768, 769, 773, 777, 778, 779, 780, 781, 782, 783, 784, 785, 786, 871, 872, 873, 874, 875, 876, 877, 878, 879, 880, 881, 882, 883, 884, or 1048 of AsCas13 or a position corresponding thereto in a Cas13 ortholog; preferably, one or more mutated amino acid residue at position 130, 131, 132, 133, 134, 135, 136, 162, 163, 164, 165, 166, 167, 168, 169, 170, 171, 172, 173, 174, 175, 176, 177, 536, 537, 538, 539, 540, 541, 542, 543, 544, 545, 546, 547, 548, 549, 550, 551, 552, 570, 571, 572, 573, 595, 596, 597, 598, 599, 600, 601, 602, 603, 604, 605, 606, 607, 608, 609, 610, 611, 612, 613, 614, 615, 630, 631, 632, 646, 647, 648, 649, 650, 651, 652, 653, 683, 684, 685, 686, 687, 688, 689, or 690

[0213] In certain embodiments, the Cas13 protein is modified to have increased activity, i.e. wider PAM specificity. In particular embodiments, the Cas13 protein is modified by mutation of one or more residues including but not limited positions 539, 542, 547, 548, 550, 551, 552, 167, 604, and/or 607 of AsCas13, or the corresponding position of an AsCas13 orthologue, homologue, or variant, preferably mutated amino acid residues at positions 542 or 542 and 607, wherein said mutations preferably are 542R and 607R, such as S542R and K607R; or preferably mutated amino acid residues at positions 542 and 548 (and optionally 552), wherein said mutations preferably are 542R and 548V (and optionally 552R), such as S542R and K548V (and optionally N552R); or at position 532, 538, 542, and/or 595 of LbCas13, or the corresponding position of an AsCas13 orthologue, homologue, or variant, preferably mutated amino acid residues at positions 532 or 532 and 595, wherein said mutations preferably are 532R and 595R, such as G532R and K595R; or preferably mutated amino acid residues at positions 532 and 538 (and optionally 542), wherein said mutations preferably are 532R and 538V (and optionally 542R), such as G532R and K538V (and optionally Y542R), most preferably wherein said mutations are S542R and K607R, S542R and K548V, or S542R, K548V and N552R of AsCas13.

### Determination of PAM

[0214] Determination of PAM can be ensured as follows. This experiment closely parallels similar work in E. coli for the heterologous expression of StCas9 (Sapranauskas, R. et al. Nucleic Acids Res 39, 9275-9282 (2011)). Applicants introduce a plasmid containing both a PAM and a resistance gene into the heterologous E. coli, and then plate on the corresponding antibiotic. If there is DNA cleavage of the plasmid, Applicants observe no viable colonies.

[0215] In further detail, the assay is as follows for a DNA target. Two E. coli strains are used in this assay. One carries a plasmid that encodes the endogenous effector protein locus from the bacterial strain. The other strain carries an empty plasmid (e.g. pACYC184, control strain). All possible 7 or 8 bp PAM sequences are presented on an antibiotic resistance plasmid (pUC19 with ampicillin resistance gene). The PAM is located next to the sequence of proto-spacer 1 (the DNA target to the first spacer in the endogenous effector protein locus). Two PAM libraries were cloned. One has a 8 random bp 5′ of the proto-spacer (e.g. total of 65536 different PAM sequences=complexity). The other library has 7 random bp 3′ of the proto-spacer (e.g. total complexity is 16384 different PAMs). Both libraries were cloned to have in average 500 plasmids per possible PAM. Test strain and control strain were transformed with 5′PAM and 3′PAM library in separate transformations and transformed cells were plated separately on ampicillin plates. Recognition and subsequent cutting/interference with the plasmid renders a cell vulnerable to ampicillin and prevents growth. Approximately 12 h after transformation, all colonies formed by the test and control strains where harvested and plasmid DNA was isolated. Plasmid DNA was used as template for PCR amplification and subsequent deep sequencing. Representation of all PAMs in the untransformed libraries showed the expected representation of PAMs in transformed cells. Representation of all PAMs found in control strains showed the actual representation. Representation of all PAMs in test strain showed which PAMs are not recognized by the enzyme and comparison to the control strain allows extracting the sequence of the depleted PAM.

[0216] The following PAMs have been identified for certain wild-type Cas13 orthologues: the Acidaminococcus sp. BV3L6 Cas13 (AsCas13), Lachnospiraceae bacterium ND2006 Cas13 (LbCas13) and Prevotella albensis (PaCas13) can cleave target sites preceded by a TTTV PAM, where V is A/C or G, FnCas13p, can cleave sites preceded by TTN, where N is A/C/G or T. The Moraxella bovoculi AAX08_00205, Moraxella bovoculi AAX11_00205, Butyrivibrio sp. NC3005, Thiomicrospira sp. XSS, or Lachnospiraceae bacterium MA2020 PAM is 5′ TTN, where N is A/C/G or T. The natural PAM sequence is TTTV or BTTV, wherein B is T/C or G and V is A/C or G and the effector protein is Moraxella lacunata Cas13.

### Codon Optimized Nucleic Acid Sequences

[0217] Where the effector protein is to be administered as a nucleic acid, the application envisages the use of codon-optimized CRISPR-Cas type V protein, and more particularly Cas13-encoding nucleic acid sequences (and optionally protein sequences). An example of a codon optimized sequence, is in this instance a sequence optimized for expression in a eukaryote, e.g., humans (i.e. being optimized for expression in humans), or for another eukaryote, animal or mammal as herein discussed; see, e.g., SaCas9 human codon optimized sequence in WO 2014/093622 (PCT/US2013/074667) as an example of a codon optimized sequence (from knowledge in the art and this disclosure, codon optimizing coding nucleic acid molecule(s), especially as to effector protein (e.g., Cas13) is within the ambit of the skilled artisan). Whilst this is preferred, it will be appreciated that other examples are possible and codon optimization for a host species other than human, or for codon optimization for specific organs is known. In some embodiments, an enzyme coding sequence encoding a DNA/RNA-targeting Cas protein is codon optimized for expression in particular cells, such as eukaryotic cells. The eukaryotic cells may be those of or derived from a particular organism, such as a plant or a mammal, including but not limited to human, or non-human eukaryote or animal or mammal as herein discussed, e.g., mouse, rat, rabbit, dog, livestock, or non-human mammal or primate. In some embodiments, processes for modifying the germ line genetic identity of human beings and/or processes for modifying the genetic identity of animals which are likely to cause them suffering without any substantial medical benefit to man or animal, and also animals resulting from such processes, may be excluded. In general, codon optimization refers to a process of modifying a nucleic acid sequence for enhanced expression in the host cells of interest by replacing at least one codon (e.g., about or more than about 1, 2, 3, 4, 5, 10, 15, 20, 25, 50, or more codons) of the native sequence with codons that are more frequently or most frequently used in the genes of that host cell while maintaining the native amino acid sequence. Various species exhibit particular bias for certain codons of a particular amino acid. Codon bias (differences in codon usage between organisms) often correlates with the efficiency of translation of messenger RNA (mRNA), which is in turn believed to be dependent on, among other things, the properties of the codons being translated and the availability of particular transfer RNA (tRNA) molecules. The predominance of selected tRNAs in a cell is generally a reflection of the codons used most frequently in peptide synthesis. Accordingly, genes can be tailored for optimal gene expression in a given organism based on codon optimization. Codon usage tables are readily available, for example, at the “Codon Usage Database” available at www.kazusa.orjp/codon/ and these tables can be adapted in a number of ways. See Nakamura, Y., et al. “Codon usage tabulated from the international DNA sequence databases: status for the year 2000” Nucl. Acids Res. 28:292 (2000). Computer algorithms for codon optimizing a particular sequence for expression in a particular host cell are also available, such as Gene Forge (Aptagen; Jacobus, Pa.), are also available. In some embodiments, one or more codons (e.g., 1, 2, 3, 4, 5, 10, 15, 20, 25, 50, or more, or all codons) in a sequence encoding a DNA/RNA-targeting Cas protein corresponds to the most frequently used codon for a particular amino acid. As to codon usage in yeast, reference is made to the online Yeast Genome database available at http://www.yeastgenome.org/community/codon_usage.shtml, or Codon selection in yeast, Bennetzen and Hall, J Biol Chem. 1982 Mar. 25; 257(6):3026-31. As to codon usage in plants including algae, reference is made to Codon usage in higher plants, green algae, and cyanobacteria, Campbell and Gowri, Plant Physiol. 1990 January; 92(1): 1-11.; as well as Codon usage in plant genes, Murray et al, Nucleic Acids Res. 1989 Jan. 25; 17(2):477-98; or Selection on the codon bias of chloroplast and cyanelle genes in different plant and algal lineages, Morton B R, J Mol Evol. 1998 April; 46(4):449-59.

### Orthologs of Cas13

[0218] The terms “orthologue” (also referred to as “ortholog” herein) and “homologue” (also referred to as “homolog” herein) are well known in the art. By means of further guidance, a “homologue” of a protein as used herein is a protein of the same species which performs the same or a similar function as the protein it is a homologue of. Homologous proteins may but need not be structurally related, or are only partially structurally related. An “orthologue” of a protein as used herein is a protein of a different species which performs the same or a similar function as the protein it is an orthologue of Orthologous proteins may but need not be structurally related, or are only partially structurally related. Homologs and orthologs may be identified by homology modelling (see, e.g., Greer, Science vol. 228 (1985) 1055, and Blundell et al. Eur J Biochem vol 172 (1988), 513) or “structural BLAST” (Dey F, Cliff Zhang Q, Petrey D, Honig B. Toward a “structural BLAST”: using structural relationships to infer function. Protein Sci. 2013 April; 22(4):359-66. doi: 10.1002/pro.2225.). See also Shmakov et al. (2015) for application in the field of CRISPR-Cas loci. Homologous proteins may but need not be structurally related, or are only partially structurally related.

[0219] The Cas13 gene is found in several diverse bacterial genomes, typically in the same locus with cas1, cas2, and cas4 genes and a CRISPR cassette (for example, FNFX1_1431-FNFX1_1428 of Francisella cf. novicida Fx1). Thus, the layout of this putative novel CRISPR-Cas system appears to be similar to that of type II-B. Furthermore, similar to Cas9, the Cas13 protein contains a readily identifiable C-terminal region that is homologous to the transposon ORF-B and includes an active RuvC-like nuclease, an arginine-rich region, and a Zn finger (absent in Cas9). However, unlike Cas9, Cas13 is also present in several genomes without a CRISPR-Cas context and its relatively high similarity with ORF-B suggests that it might be a transposon component. It was suggested that if this was a genuine CRISPR-Cas system and Cas13 is a functional analog of Cas9 it would be a novel CRISPR-Cas type, namely type V (See Annotation and Classification of CRISPR-Cas Systems. Makarova K S, Koonin E V. Methods Mol Biol. 2015; 1311:47-75). However, as described herein, Cas13 is denoted to be in subtype V-A to distinguish it from C2c1p which does not have an identical domain structure and is hence denoted to be in subtype V-B.

[0220] The present invention encompasses the use of a Cas13 effector protein, derived from a Cas13 locus denoted as subtype V-A. Herein such effector proteins are also referred to as “Cas 13p”, e.g., a Cas13 protein (and such effector protein or Cas13 protein or protein derived from a Cas13 locus is also called “CRISPR-Cas protein”).

[0221] In particular embodiments, the effector protein is a Cas13 effector protein from an organism from a genus comprising Streptococcus, Campylobacter, Nitratifractor, Staphylococcus, Parvibaculum, Roseburia, Neisseria, Gluconacetobacter, Azospirillum, Sphaerochaeta, Lactobacillus, Eubacterium, Corynebacter, Carnobacterium, Rhodobacter, Listeria, Paludibacter, Clostridium, Lachnospiraceae, Clostridiaridium, Leptotrichia, Francisella, Legionella, Alicyclobacillus, Methanomethyophilus, Porphyromonas, Prevotella, Bacteroidetes, Helcococcus, Leptospira, Desulfovibrio, Desulfonatronum, Opitutaceae, Tuberibacillus, Bacillus, Brevibacilus, Methylobacterium, Butyvibrio, Perigrinibacterium, Pareubacterium, Moraxella, Thiomicrospira or Acidaminococcus. In particular embodiments, the Cas13 effector protein is selected from an organism from a genus selected from Eubacterium, Lachnospiraceae, Leptotrichia, Francisella, Methanomethyophilus, Porphyromonas, Prevotella, Leptospira, Butyvibrio, Perigrinibacterium, Pareubacterium, Moraxella, Thiomicrospira or Acidaminococcus

[0222] In further particular embodiments, the Cas13 effector protein is from an organism selected from S. mutans, S. agalactiae, S. equisimilis, S. sanguinis, S. pneumonia; C. jejuni, C. coli; N. salsuginis, N. tergarcus; S. auricularis, S. carnosus; N. meningitides, N. gonorrhoeae; L. monocytogenes, L. ivanovii; C. botulinum, C. difficile, C. tetani, C. sordellii, L. inadai, F. tularensis 1, P. albensis, L. bacterium, B. proteoclasticus, P. bacterium, P. crevioricanis, P. disiens and P. macacae.

[0223] The effector protein may comprise a chimeric effector protein comprising a first fragment from a first effector protein (e.g., a Cas13) ortholog and a second fragment from a second effector (e.g., a Cas13) protein ortholog, and wherein the first and second effector protein orthologs are different. At least one of the first and second effector protein (e.g., a Cas13) orthologs may comprise an effector protein (e.g., a Cas13) from an organism comprising Streptococcus, Campylobacter, Nitratifractor, Staphylococcus, Parvibaculum, Roseburia, Neisseria, Gluconacetobacter, Azospirillum, Sphaerochaeta, Lactobacillus, Eubacterium, Corynebacter, Carnobacterium, Rhodobacter, Listeria, Paludibacter, Clostridium, Lachnospiraceae, Clostridiaridium, Leptotrichia, Francisella, Legionella, Alicyclobacillus, Methanomethyophilus, Porphyromonas, Prevotella, Bacteroidetes, Helcococcus, Letospira, Desulfovibrio, Desulfonatronum, Opitutaceae, Tuberibacillus, Bacillus, Brevibacilus, Methylobacterium, Butyvibrio, Perigrinibacterium, Pareubacterium, Moraxella, Thiomicrospira or Acidaminococcus; e.g., a chimeric effector protein comprising a first fragment and a second fragment wherein each of the first and second fragments is selected from a Cas13 of an organism comprising Streptococcus, Campylobacter, Nitratifractor, Staphylococcus, Parvibaculum, Roseburia, Neisseria, Gluconacetobacter, Azospirillum, Sphaerochaeta, Lactobacillus, Eubacterium, Corynebacter, Carnobacterium, Rhodobacter, Listeria, Paludibacter, Clostridium, Lachnospiraceae, Clostridiaridium, Leptotrichia, Francisella, Legionella, Alicyclobacillus, Methanomethyophilus, Porphyromonas, Prevotella, Bacteroidetes, Helcococcus, Letospira, Desulfovibrio, Desulfonatronum, Opitutaceae, Tuberibacillus, Bacillus, Brevibacilus, Methylobacterium, Butyvibrio, Perigrinibacterium, Pareubacterium, Moraxella, Thiomicrospira or Acidaminococcus wherein the first and second fragments are not from the same bacteria; for instance a chimeric effector protein comprising a first fragment and a second fragment wherein each of the first and second fragments is selected from a Cas13 of S. mutans, S. agalactiae, S. equisimilis, S. sanguinis, S. pneumonia; C. jejuni, C. coli; N. salsuginis, N. tergarcus; S. auricularis, S. carnosus; N. meningitides, N. gonorrhoeae; L. monocytogenes, L. ivanovii; C. botulinum, C. difficile, C. tetani, C. sordellii; Francisella tularensis 1, Prevotella albensis, Lachnospiraceae bacterium MC2017 1, Butyrivibrio proteoclasticus, Peregrinibacteria bacterium GW2011_GWA2_33_10, Parcubacteria bacterium GW2011_GWC2_44_17, Smithella sp. SCADC, Acidaminococcus sp. BV3L6, Lachnospiraceae bacterium MA2020, Candidatus Methanoplasma termitum, Eubacterium eligens, Moraxella bovoculi 237, Leptospira inadai, Lachnospiraceae bacterium ND2006, Porphyromonas crevioricanis 3, Prevotella disiens and Porphyromonas macacae, wherein the first and second fragments are not from the same bacteria.

[0224] In a more preferred embodiment, the Cas13p is derived from a bacterial species selected from Francisella tularensis 1, Prevotella albensis, Lachnospiraceae bacterium MC2017 1, Butyrivibrio proteoclasticus, Peregrinibacteria bacterium GW2011 GWA2_33_10, Parcubacteria bacterium GW2011_GWC2_44_17, Smithella sp. SCADC, Acidaminococcus sp. BV3L6, Lachnospiraceae bacterium MA2020, Candidatus Methanoplasma termitum, Eubacterium eligens, Moraxella bovoculi 237, Moraxella bovoculi AAX08_00205, Moraxella bovoculi AAX11_00205, Butyrivibrio sp. NC3005, Thiomicrospira sp. XS5, Leptospira inadai, Lachnospiraceae bacterium ND2006, Porphyromonas crevioricanis 3, Prevotella disiens and Porphyromonas macacae. In certain embodiments, the Cas13p is derived from a bacterial species selected from Acidaminococcus sp. BV3L6, Lachnospiraceae bacterium MA2020. In certain embodiments, the effector protein is derived from a subspecies of Francisella tularensis 1, including but not limited to Francisella tularensis subsp. Novicida. In certain preferred embodiments, the Cas13p is derived from a bacterial species selected from Acidaminococcus sp. BV3L6, Lachnospiraceae bacterium ND2006, Lachnospiraceae bacterium MA2020, Moraxella bovoculi AAX08 00205, Moraxella bovoculi AAX11_00205, Butyrivibrio sp. NC3005, or Thiomicrospira sp. XS5.

[0225] In particular embodiments, the homologue or orthologue of Cas13 as referred to herein has a sequence homology or identity of at least 80%, more preferably at least 85%, even more preferably at least 90%, such as for instance at least 95% with the example Cas13 proteins disclosed herein. In further embodiments, the homologue or orthologue of Cas13 as referred to herein has a sequence identity of at least 80%, more preferably at least 85%, even more preferably at least 90%, such as for instance at least 95% with the wild type Cas13. Where the Cas13 has one or more mutations (mutated), the homologue or orthologue of said Cas13 as referred to herein has a sequence identity of at least 80%, more preferably at least 85%, even more preferably at least 90%, such as for instance at least 95% with the mutated Cas13.

[0226] In an embodiment, the Cas13 protein may be an ortholog of an organism of a genus which includes, but is not limited to Acidaminococcus sp, Lachnospiraceae bacterium or Moraxella bovoculi; in particular embodiments, the type V Cas protein may be an ortholog of an organism of a species which includes, but is not limited to Acidaminococcus sp. BV3L6; Lachnospiraceae bacterium ND2006 (LbCas13) or Moraxella bovoculi 237. In particular embodiments, the homologue or orthologue of Cas13 as referred to herein has a sequence homology or identity of at least 80%, more preferably at least 85%, even more preferably at least 90%, such as for instance at least 95% with one or more of the Cas13 sequences disclosed herein. In further embodiments, the homologue or orthologue of Cas13 as referred to herein has a sequence identity of at least 80%, more preferably at least 85%, even more preferably at least 90%, such as for instance at least 95% with the wild type FnCas13, AsCas13 or LbCas13.

[0227] In particular embodiments, the Cas13 protein of the invention has a sequence homology or identity of at least 60%, more particularly at least 70, such as at least 80%, more preferably at least 85%, even more preferably at least 90%, such as for instance at least 95% with FnCas13, AsCas13 or LbCas13. In further embodiments, the Cas13 protein as referred to herein has a sequence identity of at least 60%, such as at least 70%, more particularly at least 80%, more preferably at least 85%, even more preferably at least 90%, such as for instance at least 95% with the wild type AsCas13 or LbCas13. In particular embodiments, the Cas13 protein of the present invention has less than 60% sequence identity with FnCas13. The skilled person will understand that this includes truncated forms of the Cas13 protein whereby the sequence identity is determined over the length of the truncated form. In particular embodiments, the Cas13 enzyme is not FnCas13.

### Examples of Cas13 Proteins

[0228] In certain example embodiments, the CRISPR Cas protein is selected from Table 1.

TABLE 1

| C2c2 orthologue | Code | Multi Letter |
|---|---|---|
| Leptotrichia shahii | C2-2 | Lsh |
| L wadei F0279 (Lw2) | C2-3 | Lw2 |
| Listeria seeligeri | C2-4 | Lse |
| Lachnospiraceae bacterium MA2020 | C2-5 | LbM |
| Lachnospiraceae bacterium NK4A179 | C2-6 | LbNK179 |
| [Clostridium] aminophilum DSM 10710 | C2-7 | Ca |
| Carnobacterium gallinarum DSM 4847 | C2-8 | Cg |
| Carnobacterium gallinarum DSM 4847 | C2-9 | Cg2 |
| Paludibacter propionicigenes WB4 | C2-10 | Pp |
| Listeria weihenstephanensis FSL R9-0317 | C2-11 | Lwei |
| Listeriaceae bacterium FSL M6-0635 | C2-12 | LbFSL |
| Leptotrichia wadei F0279 | C2-13 | Lw |
| Rhodobacter capsulatus SB 1003 | C2-14 | Rc |
| Rhodobacter capsulatus R121 | C2-15 | Rc |
| Rhodobacter capsulatus DE442 | C2-16 | Rc |

[0229] In certain example embodiments, the CRISPR effector protein is a Cas13a protein selected from Table 2

TABLE 2

| | | |
|---|---|---|
| c2c2-5 | 1 | Lachnospiraceae bacterium MA2020 (SEQ ID No. 34) |
| c2c2-6 | 2 | Lachnospiraceae bacterium NK4A179 (SEQ ID No. 35) |
| c2c2-7 | 3 | [Clostridium] aminophilum DSM 10710 SEQ ID No. 36) |
| c2c2-8 | 5 | Carnobacterium gallinarum DSM 4847 (SEQ ID No. 37) |
| c2c2-9 | 6 | Carnobacterium gallinarum DSM 4847 (SEQ ID No. 38) |
| c2c2-10 | 7 | Paludibacter propionicigenes WB4 (SEQ ID No. 39) |
| c2c2-11 | 9 | Listeria weihenstephanensis FSL R9-0317 (SEQ ID No. 40) |
| c2c2-12 | 10 | Listeriaceae bacterium FSL M60635 = Listeria |
| | | newyorkensis FSL M6-0635 (SEQ ID No. 41) |
| c2c2-13 | 12 | Leptotrichia wadei F0279 (SEQ ID No. 42) |
| c2c2-14 | 15 | Rhodobacter capsulatus SB 1003 (SEQ ID No. 43) |
| c2c2-15 | 16 | Rhodobacter capsulatus R121 (SEQ ID No. 44) |
| c2c2-16 | 17 | Rhodobacter capsulatus DE442 (SEQ ID No. 45) |
| c2c2-2 | | (SEQ ID No. 46) |
| c2c2-3 | | L wadei (Lw2) (SEQ ID No. 47) |
| c2c2-4 | | Listeria seeligeri (SEQ ID No. 48) |
| C2-17 | | Leptotrichia buccalis C-1013-b (SEQ ID No. 49) |
| C2-18 | | Herbinix hemicellulosilytica (SEQ ID No. 50) |
| C2-19 | | [Eubacterium] rectale (SEQ ID No. 51) |
| C2-20 | | Eubacteriaceae bacterium CHKCI004 (SEQ ID No. 52) |
| C2-21 | | Blautia sp. Marseille-P2398 (SEQ ID No. 53) |
| C2-22 | | Leptotrichia sp. oral taxon 879 str. F0557 |
| | | (SEQ ID No. 54) |
| C2-23 | | Lachnospiraceae bacterium NK4A144 (SEQ ID No. 55) |
| C2-24 | | Chloroflexus aggregans (SEQ ID No. 56) |
| C2-25 | | Demequina aurantiaca (SEQ ID No. 57) |
| C2-26 | | Thalassospira sp. TSL5-1 (SEQ ID No. 58) |
| C2-27 | | SAMN04487830_13920 [Pseudobutyrivibrio sp. OR37] |
| | | (SEQ ID No. 59) |
| C2-28 | | SAMN02910398_00008 [Butyrivibrio sp. YAB3001] |
| | | (SEQ ID No. 60) |
| C2-29 | | Blautia sp. Marseille-P2398 (SEQ ID No. 61) |
| C2-30 | | Leptotrichia sp. Marseille-P3007 (SEQ ID No. 62) |
| C2-31 | | Bacteroides ihuae (SEQ ID No. 63) |
| C2-32 | | SAMN05216357_1045 [Porphyromonadaceae bacterium |
| | | KH3CP3RA] (SEQ ID No. 64) |
| C2-33 | | Listeria riparia (SEQ ID No. 65) |
| C2-34 | | Insolitispirillum peregrinum (SEQ ID No. 66) |

[0230] In certain example embodiments, the CRISPR effector protein is a Cas13b protein selected from Table 3.

TABLE 3

| | |
|---|---|
| Bergeyella zoohelcum (SEQ ID No. 67) | 1 |
| Prevotella intermedia (SEQ ID No. 68) | 2 |
| Prevotella buccae (SEQ ID No. 69) | 3 |
| Porphyromonas gingivalis (SEQ ID No. 70) | 4 |
| Bacteroides pyogenes (SEQ ID No. 71) | 5 |
| Alistipes sp. ZOR0009 (SEQ ID No. 72) | 6 |
| Prevotella sp. MA2016 (SEQ ID No. 73) | 7a |
| Prevotella sp. MA2016 (SEQ ID No. 74) | 7b |
| Riemerella anatipestifer (SEQ ID No. 75) | 8 |
| Prevotella aurantiaca (SEQ ID No. 76) | 9 |
| Prevotella saccharolytica (SEQ ID No. 77) | 10 |
| HMPREF9712_03108 [Myroides odoratimimus CCUG | 11 |
| 10230] (SEQ ID No. 78) | |
| Prevotella intermedia (SEQ ID No. 79) | 12 |
| Capnocytophaga canimorsus (SEQ ID No. 80) | 13 |
| Porphyromonas gulae (SEQ ID No. 81) | 14 |
| Prevotella sp. P5-125 (SEQ ID No. 82) | 15 |
| Flavobacterium branchiophilum (SEQ ID No. 83) | 16 |
| Myroides odoratimimus (SEQ ID No. 84) | 17 |
| Flavobacterium columnare (SEQ ID No. 85) | 18 |
| Porphyromonas gingivalis (SEQ ID No. 86) | 19 |
| Porphyromonas sp. COT-052 OH4946 (SEQ ID No. 87) | 20 |
| Prevotella intermedia (SEQ ID No. 88) | 21 |
| PIN17_0200 [Prevotella intermedia 17] (SEQ ID No. 89) | AFJ07523 |
| Prevotella intermedia (SEQ ID No. 90) | BAU18623 |
| HMPREF6485_0083 [Prevotella buccae ATCC 33574] | EFU31981 |
| (SEQ ID No. 91) | |
| HMPREF9144_1146 [Prevotella pallens ATCC 700821] | EGQ18444 |
| (SEQ ID No. 92) | |
| HMPREF9714_02132 [Myroides odoratimimus CCUG | EHO08761 |
| 12901] (SEQ ID No. 93) | |
| HMPREF9711_00870 [Myroides odoratimimus CCUG | EKB06014 |
| 3837] (SEQ ID No. 94) | |
| HMPREF9699_02005 [Bergeyella zoohelcum ATCC 43767] | EKB54193 |
| (SEQ ID No. 95) | |
| HMPREF9151_01387 [Prevotella saccharolytica F0055] | EKY00089 |
| (SEQ ID No. 96) | |
| A343_1752 [Porphyromonas gingivalis JCVI SC001] (SEQ | EOA10535 |
| ID No. 97) | |
| HMPREF1981_03090 [Bacteroides pyogenes F0041] (SEQ | ERI81700 |
| ID No. 98) | |
| HMPREF1553_02065 [Porphyromonas gingivalis F0568] | ERJ65637 |
| (SEQ ID No. 99) | |
| HMPREF1988_01768 [Porphyromonas gingivalis F0185] | ERJ81987 |
| (SEQ ID No. 100) | |
| HMPREF1990_01800 [Porphyromonas gingivalis W4087] | ERJ87335 |
| (SEQ ID No. 101) | |
| M573_117042 [Prevotella intermedia ZT] (SEQ ID No. 102) | KJJ86756 |
| A2033_10205 [Bacteroidetes bacterium GWA2_31_9] (SEQ | OFX18020.1 |
| ID No. 103) | |
| SAMN05421542_0666 [Chryseobacterium jejuense] (SEQ | SDI27289.1 |
| ID No. 104) | |
| SAMN05444360_11366 [Chryseobacterium carnipullorum] | SHM52812.1 |
| (SEQ ID No. 105) | |
| SAMN05421786_1011119 [Chryseobacterium ureilyticum] | SIS70481.1 |
| (SEQ ID No. 106) | |
| Prevotella buccae (SEQ ID No. 107) | WP_004343581 |
| Porphyromonas gingivalis (SEQ ID No. 108) | WP_005873511 |
| Porphyromonas gingivalis (SEQ ID No. 109) | WP_005874195 |
| Prevotella pallens (SEQ ID No. 110) | WP_006044833 |
| Myroides odoratimimus (SEQ ID No. 111) | WP_006261414 |
| Myroides odoratimimus (SEQ ID No. 112) | WP_006265509 |
| Prevotella sp. MSX73 (SEQ ID No. 113) | WP_007412163 |
| Porphyromonas gingivalis (SEQ ID No. 114) | WP_012458414 |
| Paludibacter propionicigenes (SEQ ID No. 115) | WP_013446107 |
| Porphyromonas gingivalis (SEQ ID No. 116) | WP_013816155 |
| Flavobacterium columnare (SEQ ID No. 117) | WP_014165541 |
| Psychroflexus torquis (SEQ ID No. 118) | WP_015024765 |
| Riemerella anatipestifer (SEQ ID No. 119) | WP_015345620 |
| Prevotella pleuritidis (SEQ ID No. 120) | WP_021584635 |
| Porphyromonas gingivalis (SEQ ID No. 121) | WP_021663197 |
| Porphyromonas gingivalis (SEQ ID No. 122) | WP_021665475 |
| Porphyromonas gingivalis (SEQ ID No. 123) | WP_021677657 |
| Porphyromonas gingivalis (SEQ ID No. 124) | WP_021680012 |
| Porphyromonas gingivalis (SEQ ID No. 125) | WP_023846767 |
| Prevotella falsenii(SEQ ID No. 126) | WP_036884929 |
| Prevotella pleuritidis (SEQ ID No. 127) | WP_036931485 |
| [Porphyromonas gingivalis (SEQ ID No. 128) | WP_039417390 |
| Porphyromonas gulae (SEQ ID No. 129) | WP_039418912 |
| Porphyromonas gulae (SEQ ID No. 130) | WP_039419792 |
| Porphyromonas gulae (SEQ ID No. 131) | WP_039426176 |
| Porphyromonas gulae (SEQ ID No. 132) | WP_039431778 |
| Porphyromonas gulae (SEQ ID No. 133) | WP_039437199 |
| Porphyromonas gulae (SEQ ID No. 134) | WP_039442171 |
| Porphyromonas gulae (SEQ ID No. 135) | WP_039445055 |
| Capnocytophaga cynodegmi (SEQ ID No. 136) | WP_041989581 |
| Prevotella sp. P5-119 (SEQ ID No. 137) | WP_042518169 |
| Prevotella sp. P4-76 (SEQ ID No. 138) | WP_044072147 |
| Prevotella sp. P5-60 (SEQ ID No. 139) | WP_044074780 |
| Phaeodactylibacter xiamenensis (SEQ ID No. 140) | WP_044218239 |
| Flavobacterium sp. 316 (SEQ ID No. 141) | WP_045968377 |
| Porphyromonas gulae (SEQ ID No. 142) | WP_046201018 |
| WP_047431796 (SEQ ID No. 143) | Chryseobacterium |
| | sp. YR477 |
| Riemerella anatipestifer (SEQ ID No. 144) | WP_049354263 |
| Porphyromonas gingivalis (SEQ ID No. 145) | WP_052912312 |
| Porphyromonas gingivalis (SEQ ID No. 146) | WP_058019250 |
| Flavobacterium columnare (SEQ ID No. 147) | WP_060381855 |
| Porphyromonas gingivalis (SEQ ID No. 148) | WP_061156470 |
| Porphyromonas gingivalis (SEQ ID No. 149) | WP_061156637 |
| Riemerella anatipestifer (SEQ ID No. 150) | WP_061710138 |
| Flavobacterium columnare (SEQ ID No. 151) | WP_063744070 |
| Riemerella anatipestifer (SEQ ID No. 152) | WP_064970887 |
| Sinomicrobium oceani (SEQ ID No. 153) | WP_072319476.1 |
| Reichenbachiella agariperforans (SEQ ID No. 154) | WP_073124441.1 |

[0231] In certain example embodiments, the RNA-targeting effector protein is a Cas13c effector protein as disclosed in U.S. Provisional Patent Application No. 62/525,165 filed Jun. 26, 2017, and PCT Application No. US 2017/047193 filed Aug. 16, 2017. Example wildtype orthologue sequences of Cas13c are provided in Table 4B below In certain example embodiments, the CRISPR effector protein is a Cas13c protein from Table 4a or 4b.

TABLE 4a

Fusobacterium necrophorum subsp. funduliforme ATCC
51357 contig00003 (SEQ ID No. 155)
Fusobacterium necrophorum DJ-2 contig0065, whole
genome shotgun sequence (SEQ ID No. 156)
Fusobacterium necrophorum BFTR-1 contig0068
(SEQ ID No. 157)
Fusobacterium necrophorum subsp. funduliforme 1_1_36S
cont1.14 (SEQ ID No. 158)
Fusobacterium perfoetens ATCC 29250
T364DRAFT_scaffold00009.9_C (SEQ ID No. 159)
Fusobacterium ulcerans ATCC 49185 cont2.38 (SEQ ID No. 160)
Anaerosalibacter sp. ND1 genome assembly
Anaerosalibacter massiliensis ND1 (SEQ ID No. 161)

TABLE 4B

Name
EHO19081
WP_094899336
WP_040490876
WP_047396607
WP_035935671
WP_035906563
WP_042678931
WP_062627846
WP_005959231
WP_027128616
WP_062624740
WP_096402050

### Guide Molecule

[0232] The systems herein may comprise a guide molecule or a nucleotide sequence encoding thereof. In some cases, the guide molecule comprises a guide sequence and a direct repeat sequence. The guide sequence and the direct repeat sequence may be linked.

[0233] The guide molecule or guide RNA of a Class 2 type V CRISPR-Cas protein may comprise a tracr-mate sequence (encompassing a “direct repeat” in the context of an endogenous CRISPR system) and a guide sequence (also referred to as a “spacer” in the context of an endogenous CRISPR system). Indeed, in contrast to the type II CRISPR-Cas proteins, the Cas13 protein does not rely on the presence of a tracr sequence. In some embodiments, the CRISPR-Cas system or complex as described herein does not comprise and/or does not rely on the presence of a tracr sequence (e.g. if the Cas protein is Cas13). In certain embodiments, the guide molecule may comprise, consist essentially of, or consist of a direct repeat sequence fused or linked to a guide sequence or spacer sequence.

[0234] In general, a CRISPR system is characterized by elements that promote the formation of a CRISPR complex at the site of a target sequence. In the context of formation of a CRISPR complex, “target sequence” refers to a sequence to which a guide sequence is designed to have complementarity, where hybridization between a target DNA sequence and a guide sequence promotes the formation of a CRISPR complex.

[0235] The terms “guide molecule” and “guide RNA” are used interchangeably herein to refer to RNA-based molecules that are capable of forming a complex with a CRISPR-Cas protein and comprises a guide sequence having sufficient complementarity with a target nucleic acid sequence to hybridize with the target nucleic acid sequence and direct sequence-specific binding of the complex to the target nucleic acid sequence. The guide molecule or guide RNA specifically encompasses RNA-based molecules having one or more chemically modifications (e.g., by chemical linking two ribonucleotides or by replacement of one or more ribonucleotides with one or more deoxyribonucleotides), as described herein.

[0236] As used herein, the term “guide sequence” in the context of a CRISPR-Cas system, comprises any polynucleotide sequence having sufficient complementarity with a target nucleic acid sequence to hybridize with the target nucleic acid sequence and direct sequence-specific binding of a nucleic acid-targeting complex to the target nucleic acid sequence. The guide sequence may form a duplex with a target sequence. The duplex may be a DNA duplex, an RNA duplex, or a RNA/DNA duplex. In some cases, the guide sequence is capable of hybridizing with a target RNA sequence comprising an Adenine to form an RNA duplex, wherein the guide sequence comprises a non-pairing Cytosine at a position corresponding to the Adenine resulting in an A-C mismatch in the RNA duplex formed.

[0237] In the context of the present invention the target nucleic acid sequence or target sequence is the sequence comprising the target adenosine to be deaminated also referred to herein as the “target adenosine”. When the guide sequence and the target sequence form a duplex, the adenosine deaminase protein or catalytic domain thereof may deaminate an Adenine in the duplex. In the context of the present invention the target nucleic acid sequence or target sequence is the sequence comprising the target cytosine to be deaminated also referred to herein as the “target cytidine”. When the guide sequence and the target sequence form a duplex, the cytidine deaminase protein or catalytic domain thereof may deaminate an Adenine in the duplex.

[0238] In some embodiments, except for the intended dA-C mismatch, the degree of complementarity, when optimally aligned using a suitable alignment algorithm, is about or more than about 50%, 60%, 75%, 80%, 85%, 90%, 95%, 97.5%, 99%, or more. Optimal alignment may be determined with the use of any suitable algorithm for aligning sequences, non-limiting example of which include the Smith-Waterman algorithm, the Needleman-Wunsch algorithm, algorithms based on the Burrows-Wheeler Transform (e.g., the Burrows Wheeler Aligner), ClustalW, Clustal X, BLAT, Novoalign (Novocraft Technologies; available at www.novocraft.com), ELAND (Illumina, San Diego, Calif.), SOAP (available at soap.genomics.org.cn), and Maq (available at maq.sourceforge.net). The ability of a guide sequence (within a nucleic acid-targeting guide RNA) to direct sequence-specific binding of a nucleic acid-targeting complex to a target nucleic acid sequence may be assessed by any suitable assay. For example, the components of a nucleic acid-targeting CRISPR system sufficient to form a nucleic acid-targeting complex, including the guide sequence to be tested, may be provided to a host cell having the corresponding target nucleic acid sequence, such as by transfection with vectors encoding the components of the nucleic acid-targeting complex, followed by an assessment of preferential targeting (e.g., cleavage) within the target nucleic acid sequence, such as by Surveyor assay as described herein. Similarly, cleavage of a target nucleic acid sequence (or a sequence in the vicinity thereof) may be evaluated in a test tube by providing the target nucleic acid sequence, components of a nucleic acid-targeting complex, including the guide sequence to be tested and a control guide sequence different from the test guide sequence, and comparing binding or rate of cleavage at or in the vicinity of the target sequence between the test and control guide sequence reactions. Other assays are possible, and will occur to those skilled in the art. A guide sequence, and hence a nucleic acid-targeting guide RNA may be selected to target any target nucleic acid sequence.

[0239] In some embodiments, the guide molecule comprises a guide sequence that is designed to have at least one mismatch with the target sequence, such that an RNA duplex formed between the guide sequence and the target sequence comprises a non-pairing C in the guide sequence opposite to the target A for deamination on the target sequence. In some embodiments, aside from this A-C mismatch, the degree of complementarity, when optimally aligned using a suitable alignment algorithm, is about or more than about 50%, 60%, 75%, 80%, 85%, 90%, 95%, 97.5%, 99%, or more. In some cases, the distance between the non-pairing C and the 5′ end of the guide sequence is from about 10 to about 50, e.g., from about 10 to about 20, from about 15 to about 25, from about 20 to about 30, from about 25 to about 35, from about 30 to about 40, from about 35 to about 45, or from about 40 to about 50 nucleotides (nt) in length. In certain example, In some cases, the distance between the non-pairing C and the 3′ end of the guide sequence is from about 10 to about 50, e.g., from about 10 to about 20, from about 15 to about 25, from about 20 to about 30, from about 25 to about 35, from about 30 to about 40, from about 35 to about 45, or from about 40 to about 50 nucleotides (nt) in length. In one example, the distance between the non-pairing C and the 5′ end of said guide sequence is from about 20 to about 30 nucleotides.

[0240] In certain embodiments, the guide sequence or spacer length of the guide molecules is from 15 to 50 nt. In certain embodiments, the spacer length of the guide RNA is at least 15 nucleotides. In certain embodiments, the spacer length is from 15 to 17 nt, e.g., 15, 16, or 17 nt, from 17 to 20 nt, e.g., 17, 18, 19, or 20 nt, from 20 to 24 nt, e.g., 20, 21, 22, 23, or 24 nt, from 23 to 25 nt, e.g., 23, 24, or 25 nt, from 24 to 27 nt, e.g., 24, 25, 26, or 27 nt, from 27-30 nt, e.g., 27, 28, 29, or 30 nt, from 30-35 nt, e.g., 30, 31, 32, 33, 34, or 35 nt, or 35 nt or longer. In certain example embodiment, the guide sequence is 15, 16, 17, 18, 19, 20, 21, 22, 23, 24, 25, 26, 27, 28, 29, 30, 31, 32, 33, 34, 35, 36, 37, 38, 39 40, 41, 42, 43, 44, 45, 46, 47 48, 49, 50, 51, 52, 53, 54, 55, 56, 57, 58, 59, 60, 61, 62, 63, 64, 65, 66, 67, 68, 69, 70, 71, 72, 73, 74, 75, 76, 77, 78, 79, 80, 81, 82, 83, 84, 85, 86, 87, 88, 89, 90, 91, 92, 93, 94, 95, 96, 97, 98, 99, or 100 nt.

[0241] In some embodiments, the guide sequence has a length from about 10 to about 100, e.g., from about 20 to about 60, from about 20 to about 55, from about 20 to about 53, from about 25 to about 53, from about 29 to about 53, from about 20 to about 30, from about 25 to about 35, from about 30 to about 40, from about 35 to about 45, from about 40 to about 50, from about 45 to about 55, from about 50 to about 60, from about 55 to about 65, from about 60 to about 70, from about 70 to about 80, from about 80 to about 90, or from about 90 to about 100 nucleotides (nt) long that is capable of forming an RNA duplex with a target sequence. In certain example, the guide sequence has a length from about 20 to about 53 nt capable of forming said RNA duplex with said target sequence. In certain example, the guide sequence has a length from about 25 to about 53 nt capable of forming said RNA duplex with said target sequence. In certain example, the guide sequence has a length from about 29 to about 53 nt capable of forming said RNA duplex with said target sequence. In certain example, the guide sequence has a length from about 40 to about 50 nt capable of forming said RNA duplex with said target sequence.

[0242] In some embodiments, the guide sequence is an RNA sequence of between 10 to 50 nt in length, but more particularly of about 20-30 nt advantageously about 20 nt, 23-25 nt or 24 nt. The guide sequence is selected so as to ensure that it hybridizes to the target sequence comprising the nucleotide to be deaminated. This is described more in detail below. Selection can encompass further steps which increase efficacy and specificity of deamination.

[0243] In some embodiments, the guide sequence is about 20 nt to about 30 nt long and hybridizes to the target DNA strand to form an almost perfectly matched duplex, except for having a dA-C mismatch at the target adenosine site. Particularly, in some embodiments, the dA-C mismatch is located close to the center of the target sequence (and thus the center of the duplex upon hybridization of the guide sequence to the target sequence), thereby restricting the adenosine deaminase to a narrow editing window (e.g., about 4 bp wide). In some embodiments, the target sequence may comprise more than one target adenosine to be deaminated. In further embodiments the target sequence may further comprise one or more dA-C mismatch 3′ to the target adenosine site. In some embodiments, to avoid off-target editing at an unintended Adenine site in the target sequence, the guide sequence can be designed to comprise a non-pairing Guanine at a position corresponding to said unintended Adenine to introduce a dA-G mismatch, which is catalytically unfavorable for certain adenosine deaminases such as ADAR1 and ADAR2. See Wong et al., RNA 7:846-858 (2001), which is incorporated herein by reference in its entirety.

[0244] In some embodiments, a Cas13 guide sequence having a canonical length (e.g., about 24 nt for AsCas13) is used to form an RNA duplex with the target DNA. In some embodiments, a Cas13 guide molecule longer than the canonical length (e.g., >24 nt for AsCas13) is used to form an RNA duplex with the target DNA including outside of the Cas13-guide RNA-target DNA complex. This can be of interest where deamination of more than one adenine within a given stretch of nucleotides is of interest. In alternative embodiments, it is of interest to maintain the limitation of the canonical guide sequence length. In some embodiments, the guide sequence is designed to introduce a dA-C mismatch outside of the canonical length of Cas13 guide, which may decrease steric hindrance by Cas13 and increase the frequency of contact between the adenosine deaminase and the dA-C mismatch.

[0245] In some embodiments, the sequence of the guide molecule (direct repeat and/or spacer) is selected to reduce the degree secondary structure within the guide molecule. In some embodiments, about or less than about 75%, 50%, 40%, 30%, 25%, 20%, 15%, 10%, 5%, 1%, or fewer of the nucleotides of the nucleic acid-targeting guide RNA participate in self-complementary base pairing when optimally folded. Optimal folding may be determined by any suitable polynucleotide folding algorithm. Some programs are based on calculating the minimal Gibbs free energy. An example of one such algorithm is mFold, as described by Zuker and Stiegler (Nucleic Acids Res. 9 (1981), 133-148). Another example folding algorithm is the online webserver RNAfold, developed at Institute for Theoretical Chemistry at the University of Vienna, using the centroid structure prediction algorithm (see e.g., A.R. Gruber et al., 2008, Cell 106(1): 23-24; and PA Carr and GM Church, 2009, Nature Biotechnology 27(12): 1151-62).

[0246] In some embodiments, it is of interest to reduce the susceptibility of the guide molecule to RNA cleavage, such as to cleavage by Cas13. Accordingly, in particular embodiments, the guide molecule is adjusted to avoid cleavage by Cas13 or other RNA-cleaving enzymes.

[0247] In certain embodiments, the guide molecule comprises non-naturally occurring nucleic acids and/or non-naturally occurring nucleotides and/or nucleotide analogs, and/or chemically modifications. Preferably, these non-naturally occurring nucleic acids and non-naturally occurring nucleotides are located outside the guide sequence. Non-naturally occurring nucleic acids can include, for example, mixtures of naturally and non-naturally occurring nucleotides. Non-naturally occurring nucleotides and/or nucleotide analogs may be modified at the ribose, phosphate, and/or base moiety. In an embodiment of the invention, a guide nucleic acid comprises ribonucleotides and non-ribonucleotides. In one such embodiment, a guide comprises one or more ribonucleotides and one or more deoxyribonucleotides. In an embodiment of the invention, the guide comprises one or more non-naturally occurring nucleotide or nucleotide analog such as a nucleotide with phosphorothioate linkage, a locked nucleic acid (LNA) nucleotides comprising a methylene bridge between the 2′ and 4′ carbons of the ribose ring, or bridged nucleic acids (BNA). Other examples of modified nucleotides include 2′-O-methyl analogs, 2′-deoxy analogs, or 2′-fluoro analogs. Further examples of modified bases include, but are not limited to, 2-aminopurine, 5-bromo-uridine, pseudouridine, inosine, 7-methylguanosine. Examples of guide RNA chemical modifications include, without limitation, incorporation of 2′-O-methyl (M), 2′-O-methyl 3′phosphorothioate (MS), S-constrained ethyl(cEt), or 2′-O-methyl 3′thioPACE (MSP) at one or more terminal nucleotides. Such chemically modified guides can comprise increased stability and increased activity as compared to unmodified guides, though on-target vs. off-target specificity is not predictable. (See, Hendel, 2015, Nat Biotechnol. 33(9):985-9, doi: 10.1038/nbt.3290, published online 29 Jun. 2015 Ragdarm et al., 0215, PNAS, E7110-E7111; Allerson et al., J. Med. Chem. 2005, 48:901-904; Bramsen et al., Front. Genet., 2012, 3:154; Deng et al., PNAS, 2015, 112:11870-11875; Sharma et al., MedChemComm., 2014, 5:1454-1471; Hendel et al., Nat. Biotechnol. (2015) 33(9): 985-989; Li et al., Nature Biomedical Engineering, 2017, 1, 0066 DOI:10.1038/s41551-017-0066). In some embodiments, the 5′ and/or 3′ end of a guide RNA is modified by a variety of functional moieties including fluorescent dyes, polyethylene glycol, cholesterol, proteins, or detection tags. (See Kelly et al., 2016, J. Biotech. 233:74-83). In certain embodiments, a guide comprises ribonucleotides in a region that binds to a target DNA and one or more deoxyribonucletides and/or nucleotide analogs in a region that binds to Cas13. In an embodiment of the invention, deoxyribonucleotides and/or nucleotide analogs are incorporated in engineered guide structures, such as, without limitation, stem-loop regions, and the seed region. For Cas13 guide, in certain embodiments, the modification is not in the 5′-handle of the stem-loop regions. Chemical modification in the 5′-handle of the stem-loop region of a guide may abolish its function (see Li, et al., Nature Biomedical Engineering, 2017, 1:0066). In certain embodiments, at least 1, 2, 3, 4, 5, 6, 7, 8, 9, 10, 11, 12, 13, 14, 15, 16, 17, 18, 19, 20, 21, 22, 23, 24, 25, 26, 27, 28, 29, 30, 35, 40, 45, 50, or 75 nucleotides of a guide is chemically modified. In some embodiments, 3-5 nucleotides at either the 3′ or the 5′ end of a guide is chemically modified. In some embodiments, only minor modifications are introduced in the seed region, such as 2′-F modifications. In some embodiments, 2′-F modification is introduced at the 3′ end of a guide. In certain embodiments, three to five nucleotides at the 5′ and/or the 3′ end of the guide are chemically modified with 2′-O-methyl (M), 2′-O-methyl 3′ phosphorothioate (MS), S-constrained ethyl(cEt), or 2′-O-methyl 3′ thioPACE (MSP). Such modification can enhance genome editing efficiency (see Hendel et al., Nat. Biotechnol. (2015) 33(9): 985-989). In certain embodiments, all of the phosphodiester bonds of a guide are substituted with phosphorothioates (PS) for enhancing levels of gene disruption. In certain embodiments, more than five nucleotides at the 5′ and/or the 3′ end of the guide are chemically modified with 2′-O-Me, 2′-F or S-constrained ethyl(cEt). Such chemically modified guide can mediate enhanced levels of gene disruption (see Ragdarm et al., 0215, PNAS, E7110-E7111). In an embodiment of the invention, a guide is modified to comprise a chemical moiety at its 3′ and/or 5′ end. Such moieties include, but are not limited to amine, azide, alkyne, thio, dibenzocyclooctyne (DBCO), or Rhodamine. In certain embodiment, the chemical moiety is conjugated to the guide by a linker, such as an alkyl chain. In certain embodiments, the chemical moiety of the modified guide can be used to attach the guide to another molecule, such as DNA, RNA, protein, or nanoparticles. Such chemically modified guide can be used to identify or enrich cells generically edited by a CRISPR system (see Lee et al., eLife, 2017, 6:e25312, DOI:10.7554).

[0248] In some embodiments, the guide comprises a modified Cas13 crRNA, having a 5′-handle and a guide segment further comprising a seed region and a 3′-terminus. In some embodiments, the modified guide can be used with a Cas13 of any one of Acidaminococcus sp. BV3L6 Cas13 (AsCas13); Francisella tularensis subsp. Novicida U112 Cas13 (FnCas13); L. bacterium MC2017 Cas13 (Lb3Cas13); Butyrivibrio proteoclasticus Cas13 (BpCas13); Parcubacteria bacterium GWC2011 GWC2_44_17 Cas13 (PbCas13); Peregrinibacteria bacterium GW2011_GWA_33_10 Cas13 (PeCas13); Leptospira inadai Cas13 (LiCas13); Smithella sp. SC_K08D17 Cas13 (SsCas13); L. bacterium MA2020 Cas13 (Lb2Cas13); Porphyromonas crevioricanis Cas13 (PcCas13); Porphyromonas macacae Cas13 (PmCas13); Candidatus Methanoplasma termitum Cas13 (CMtCas13); Eubacterium eligens Cas13 (EeCas13); Moraxella bovoculi 237 Cas13 (MbCas13); Prevotella disiens Cas13 (PdCas13); or L. bacterium ND2006 Cas13 (LbCas13).

[0249] In some embodiments, the modification to the guide is a chemical modification, an insertion, a deletion or a split. In some embodiments, the chemical modification includes, but is not limited to, incorporation of 2′-O-methyl (M) analogs, 2′-deoxy analogs, 2-thiouridine analogs, N6-methyladenosine analogs, 2′-fluoro analogs, 2-aminopurine, 5-bromo-uridine, pseudouridine (Ψ), N1-methylpseudouridine (me1Ψ), 5-methoxyuridine(5moU), inosine, 7-methylguanosine, 2′-O-methyl 3′phosphorothioate (MS), S-constrained ethyl(cEt), phosphorothioate (PS), or 2′-O-methyl 3′thioPACE (MSP). In some embodiments, the guide comprises one or more of phosphorothioate modifications. In certain embodiments, at least 1, 2, 3, 4, 5, 6, 7, 8, 9, 10, 11, 12, 13, 14, 15, 16, 17, 18, 19, 20, or 25 nucleotides of the guide are chemically modified. In certain embodiments, one or more nucleotides in the seed region are chemically modified. In certain embodiments, one or more nucleotides in the 3′-terminus are chemically modified. In certain embodiments, none of the nucleotides in the 5′-handle is chemically modified. In some embodiments, the chemical modification in the seed region is a minor modification, such as incorporation of a 2′-fluoro analog. In a specific embodiment, one nucleotide of the seed region is replaced with a 2′-fluoro analog. In some embodiments, 5 to 10 nucleotides in the 3′-terminus are chemically modified. Such chemical modifications at the 3′-terminus of the Cas13 CrRNA may improve Cas13 activity (see Li, et al., Nature Biomedical Engineering, 2017, 1:0066). In a specific embodiment, 1, 2, 3, 4, 5, 6, 7, 8, 9 or 10 nucleotides in the 3′-terminus are replaced with 2′-fluoro analogues. In a specific embodiment, 1, 2, 3, 4, 5, 6, 7, 8, 9 or 10 nucleotides in the 3′-terminus are replaced with 2′-O-methyl (M) analogs.

[0250] In some embodiments, the loop of the 5′-handle of the guide is modified. In some embodiments, the loop of the 5′-handle of the guide is modified to have a deletion, an insertion, a split, or chemical modifications. In certain embodiments, the modified loop comprises 3, 4, or 5 nucleotides. In certain embodiments, the loop comprises the sequence of UCUU, UUUU, UAUU, or UGUU.

[0251] In some embodiments, the guide molecule forms a stem loop with a separate non-covalently linked sequence, which can be DNA or RNA. In particular embodiments, the sequences forming the guide are first synthesized using the standard phosphoramidite synthetic protocol (Herdewijn, P., ed., Methods in Molecular Biology Col 288, Oligonucleotide Synthesis: Methods and Applications, Humana Press, New Jersey (2012)). In some embodiments, these sequences can be functionalized to contain an appropriate functional group for ligation using the standard protocol known in the art (Hermanson, G. T., Bioconjugate Techniques, Academic Press (2013)). Examples of functional groups include, but are not limited to, hydroxyl, amine, carboxylic acid, carboxylic acid halide, carboxylic acid active ester, aldehyde, carbonyl, chlorocarbonyl, imidazolylcarbonyl, hydrozide, semicarbazide, thio semicarbazide, thiol, maleimide, haloalkyl, sufonyl, ally, propargyl, diene, alkyne, and azide. Once this sequence is functionalized, a covalent chemical bond or linkage can be formed between this sequence and the direct repeat sequence. Examples of chemical bonds include, but are not limited to, those based on carbamates, ethers, esters, amides, imines, amidines, aminotrizines, hydrozone, disulfides, thioethers, thioesters, phosphorothioates, phosphorodithioates, sulfonamides, sulfonates, fulfones, sulfoxides, ureas, thioureas, hydrazide, oxime, triazole, photolabile linkages, C—C bond forming groups such as Diels-Alder cyclo-addition pairs or ring-closing metathesis pairs, and Michael reaction pairs.

[0252] In some embodiments, these stem-loop forming sequences can be chemically synthesized. In some embodiments, the chemical synthesis uses automated, solid-phase oligonucleotide synthesis machines with 2′-acetoxyethyl orthoester (2′-ACE) (Scaringe et al., J. Am. Chem. Soc. (1998) 120: 11820-11821; Scaringe, Methods Enzymol. (2000) 317: 3-18) or 2′-thionocarbamate (2′-TC) chemistry (Dellinger et al., J. Am. Chem. Soc. (2011) 133: 11540-11546; Hendel et al., Nat. Biotechnol. (2015) 33:985-989).

[0253] In certain embodiments, the guide molecule (capable of guiding Cas13 to a target locus) comprises (1) a guide sequence capable of hybridizing to a target locus and (2) a tracr mate or direct repeat sequence whereby the direct repeat sequence is located upstream (i.e., 5′) from the guide sequence. In a particular embodiment the seed sequence (i.e. the sequence essential critical for recognition and/or hybridization to the sequence at the target locus) of the Cas13 guide sequence is approximately within the first 10 nucleotides of the guide sequence. In particular embodiments, the Cas13 is FnCas13 and the seed sequence is approximately within the first 5 nt on the 5′ end of the guide sequence.

[0254] In a particular embodiment the guide molecule comprises a guide sequence linked to a direct repeat sequence, wherein the direct repeat sequence comprises one or more stem loops or optimized secondary structures. In particular embodiments, the direct repeat has a minimum length of 16 nts and a single stem loop. In further embodiments the direct repeat has a length longer than 16 nts, preferably more than 17 nts, and has more than one stem loops or optimized secondary structures. In particular embodiments the guide molecule comprises or consists of the guide sequence linked to all or part of the natural direct repeat sequence. A typical Type V Cas13 guide molecule comprises (in 3′ to 5′ direction): a guide sequence a first complimentary stretch (the “repeat”), a loop (which is typically 4 or 5 nucleotides long), a second complimentary stretch (the “anti-repeat” being complimentary to the repeat), and a poly A (often poly U in RNA) tail (terminator). In certain embodiments, the direct repeat sequence retains its natural architecture and forms a single stem loop. In particular embodiments, certain aspects of the guide architecture can be modified, for example by addition, subtraction, or substitution of features, whereas certain other aspects of guide architecture are maintained. Preferred locations for engineered guide molecule modifications, including but not limited to insertions, deletions, and substitutions include guide termini and regions of the guide molecule that are exposed when complexed with the Cas13 protein and/or target, for example the stemloop of the direct repeat sequence.

[0255] In particular embodiments, the stem comprises at least about 4 bp comprising complementary X and Y sequences, although stems of more, e.g., 5, 6, 7, 8, 9, 10, 11 or 12 or fewer, e.g., 3, 2, base pairs are also contemplated. Thus, for example X2-10 and Y2-10 (wherein X and Y represent any complementary set of nucleotides) may be contemplated. In one aspect, the stem made of the X and Y nucleotides, together with the loop will form a complete hairpin in the overall secondary structure; and, this may be advantageous and the amount of base pairs can be any amount that forms a complete hairpin. In one aspect, any complementary X:Y basepairing sequence (e.g., as to length) is tolerated, so long as the secondary structure of the entire guide molecule is preserved. In one aspect, the loop that connects the stem made of X:Y basepairs can be any sequence of the same length (e.g., 4 or 5 nucleotides) or longer that does not interrupt the overall secondary structure of the guide molecule. In one aspect, the stemloop can further comprise, e.g. an MS2 aptamer. In one aspect, the stem comprises about 5-7 bp comprising complementary X and Y sequences, although stems of more or fewer basepairs are also contemplated. In one aspect, non-Watson Crick basepairing is contemplated, where such pairing otherwise generally preserves the architecture of the stemloop at that position.

[0256] In particular embodiments the natural hairpin or stemloop structure of the guide molecule is extended or replaced by an extended stemloop. It has been demonstrated that extension of the stem can enhance the assembly of the guide molecule with the CRISPR-Cas protein (Chen et al. Cell. (2013); 155(7): 1479-1491). In particular embodiments the stem of the stemloop is extended by at least 1, 2, 3, 4, 5 or more complementary basepairs (i.e. corresponding to the addition of 2, 4, 6, 8, 10 or more nucleotides in the guide molecule). In particular embodiments these are located at the end of the stem, adjacent to the loop of the stemloop.

[0257] In particular embodiments, the susceptibility of the guide molecule to RNAses or to decreased expression can be reduced by slight modifications of the sequence of the guide molecule which do not affect its function. For instance, in particular embodiments, premature termination of transcription, such as premature transcription of U6 Pol-III, can be removed by modifying a putative Pol-III terminator (4 consecutive U's) in the guide molecules sequence. Where such sequence modification is required in the stemloop of the guide molecule, it is preferably ensured by a basepair flip.

[0258] In a preferred embodiment the direct repeat may be modified to comprise one or more protein-binding RNA aptamers. In a particular embodiment, one or more aptamers may be included such as part of optimized secondary structure. Such aptamers may be capable of binding a bacteriophage coat protein as detailed further herein.

[0259] In some embodiments, the guide molecule forms a duplex with a target DNA strand comprising at least one target nucleotide residues to be edited. Upon hybridization of the guide RNA molecule to the target DNA strand, the nucleotide deaminase binds to the duplex and catalyzes deamination of one or more target nucleotide residues comprised within the DNA-RNA duplex.

[0260] A guide sequence, and hence a nucleic acid-targeting guide RNA may be selected to target any target nucleic acid sequence. The target sequence may be DNA. The target sequence may be genomic DNA. The target sequence may be mitochondrial DNA.

[0261] In certain embodiments, the target sequence should be associated with a PAM (protospacer adjacent motif) or PFS (protospacer flanking sequence or site); that is, a short sequence recognized by the CRISPR complex. Depending on the nature of the CRISPR-Cas protein, the target sequence should be selected such that its complementary sequence in the DNA duplex (also referred to herein as the non-target sequence) is upstream or downstream of the PAM. In the embodiments of the present invention where the CRISPR-Cas protein is a Cas13 protein, the complementary sequence of the target sequence in a is downstream or 3′ of the PAM. The precise sequence and length requirements for the PAM differ depending on the Cas13 protein used, but PAMs are typically 2-5 base pair sequences adjacent the protospacer (that is, the target sequence). Examples of the natural PAM sequences for different Cas13 orthologues are provided herein below and the skilled person will be able to identify further PAM sequences for use with a given Cas13 protein.

[0262] Further, engineering of the PAM Interacting (PI) domain may allow programing of PAM specificity, improve target site recognition fidelity, and increase the versatility of the CRISPR-Cas protein, for example as described for Cas9 in Kleinstiver B P et al. Engineered CRISPR-Cas9 nucleases with altered PAM specificities. Nature. 2015 Jul. 23; 523(7561):481-5. doi: 10.1038/nature14592. As further detailed herein, the skilled person will understand that Cas13 proteins may be modified analogously.

[0263] In particular embodiments, the guide sequence is selected in order to ensure optimal efficiency of the deaminase on the adenine to be deaminated. The position of the adenine in the target strand relative to the cleavage site of the Cas13 nickase may be taken into account. In particular embodiments it is of interest to ensure that the nickase will act in the vicinity of the adenine to be deaminated, on the non-target strand. For instance, in particular embodiments, the Cas13 nickase cuts the non-targeting strand 17 nucleotides downstream of the PAM (e.g. AsCas13, LbCas13) or 18 nucleotides downstream of the PAM (e.g. FnCas13), and it can be of interest to design the guide that the cytosine which is to correspond to the adenine to be deaminated is located in the guide sequence within 10 bp upstream or downstream of the nickase cleavage site in the sequence of the corresponding non-target strand.

[0264] In particular embodiment, the guide is an escorted guide. By “escorted” is meant that the Cas13 CRISPR-Cas system or complex or guide is delivered to a selected time or place within a cell, so that activity of the Cas13 CRISPR-Cas system or complex or guide is spatially or temporally controlled. For example, the activity and destination of the Cas13 CRISPR-Cas system or complex or guide may be controlled by an escort RNA aptamer sequence that has binding affinity for an aptamer ligand, such as a cell surface protein or other localized cellular component. Alternatively, the escort aptamer may for example be responsive to an aptamer effector on or in the cell, such as a transient effector, such as an external energy source that is applied to the cell at a particular time.

[0265] The escorted Cas13 CRISPR-Cas systems or complexes have a guide molecule with a functional structure designed to improve guide molecule structure, architecture, stability, genetic expression, or any combination thereof. Such a structure can include an aptamer.

[0266] Aptamers are biomolecules that can be designed or selected to bind tightly to other ligands, for example using a technique called systematic evolution of ligands by exponential enrichment (SELEX; Tuerk C, Gold L: “Systematic evolution of ligands by exponential enrichment: RNA ligands to bacteriophage T4 DNA polymerase.” Science 1990, 249:505-510). Nucleic acid aptamers can for example be selected from pools of random-sequence oligonucleotides, with high binding affinities and specificities for a wide range of biomedically relevant targets, suggesting a wide range of therapeutic utilities for aptamers (Keefe, Anthony D., Supriya Pai, and Andrew Ellington. “Aptamers as therapeutics.” Nature Reviews Drug Discovery 9.7 (2010): 537-550). These characteristics also suggest a wide range of uses for aptamers as drug delivery vehicles (Levy-Nissenbaum, Etgar, et al. “Nanotechnology and aptamers: applications in drug delivery.” Trends in biotechnology 26.8 (2008): 442-449; and, Hicke B J, Stephens A W. “Escort aptamers: a delivery service for diagnosis and therapy.” J Clin Invest 2000, 106:923-928.). Aptamers may also be constructed that function as molecular switches, responding to a que by changing properties, such as RNA aptamers that bind fluorophores to mimic the activity of green flourescent protein (Paige, Jeremy S., Karen Y. Wu, and Samie R. Jaffrey. “RNA mimics of green fluorescent protein.” Science 333.6042 (2011): 642-646). It has also been suggested that aptamers may be used as components of targeted siRNA therapeutic delivery systems, for example targeting cell surface proteins (Zhou, Jiehua, and John J. Rossi. “Aptamer-targeted cell-specific RNA interference.” Silence 1.1 (2010): 4).

[0267] Accordingly, in particular embodiments, the guide molecule is modified, e.g., by one or more aptamer(s) designed to improve guide molecule delivery, including delivery across the cellular membrane, to intracellular compartments, or into the nucleus. Such a structure can include, either in addition to the one or more aptamer(s) or without such one or more aptamer(s), moiety(ies) so as to render the guide molecule deliverable, inducible or responsive to a selected effector. The invention accordingly comprehends an guide molecule that responds to normal or pathological physiological conditions, including without limitation pH, hypoxia, 02 concentration, temperature, protein concentration, enzymatic concentration, lipid structure, light exposure, mechanical disruption (e.g. ultrasound waves), magnetic fields, electric fields, or electromagnetic radiation.

[0268] Light responsiveness of an inducible system may be achieved via the activation and binding of cryptochrome-2 and CIB1. Blue light stimulation induces an activating conformational change in cryptochrome-2, resulting in recruitment of its binding partner CIB1. This binding is fast and reversible, achieving saturation in <15 sec following pulsed stimulation and returning to baseline <15 min after the end of stimulation. These rapid binding kinetics result in a system temporally bound only by the speed of transcription/translation and transcript/protein degradation, rather than uptake and clearance of inducing agents. Crytochrome-2 activation is also highly sensitive, allowing for the use of low light intensity stimulation and mitigating the risks of phototoxicity. Further, in a context such as the intact mammalian brain, variable light intensity may be used to control the size of a stimulated region, allowing for greater precision than vector delivery alone may offer.

[0269] The invention contemplates energy sources such as electromagnetic radiation, sound energy or thermal energy to induce the guide. Advantageously, the electromagnetic radiation is a component of visible light. In a preferred embodiment, the light is a blue light with a wavelength of about 450 to about 495 nm. In an especially preferred embodiment, the wavelength is about 488 nm. In another preferred embodiment, the light stimulation is via pulses. The light power may range from about 0-9 mW/cm2. In a preferred embodiment, a stimulation paradigm of as low as 0.25 sec every 15 sec should result in maximal activation.

[0270] The chemical or energy sensitive guide may undergo a conformational change upon induction by the binding of a chemical source or by the energy allowing it act as a guide and have the Cas13 CRISPR-Cas system or complex function. The invention can involve applying the chemical source or energy so as to have the guide function and the Cas13 CRISPR-Cas system or complex function; and optionally further determining that the expression of the genomic locus is altered.

[0271] There are several different designs of this chemical inducible system: 1. ABI-PYL based system inducible by Abscisic Acid (ABA) (see, e.g., http://stke.sciencemag.org/cgi/content/abstract/sigtrans; 4/164/rs2), 2. FKBP-FRB based system inducible by rapamycin (or related chemicals based on rapamycin) (see, e.g., http://www.nature.com/nmeth/journal/v2/n6/full/nmeth763.html), 3. GID1-GAI based system inducible by Gibberellin (GA) (see, e.g., http://www.nature.com/nchembio/journal/v8/n5/full/nchembio.922.html).

[0272] A chemical inducible system can be an estrogen receptor (ER) based system inducible by 4-hydroxytamoxifen (4OHT) (see, e.g., http://www.pnas.org/content/104/3/1027.abstract). A mutated ligand-binding domain of the estrogen receptor called ERT2 translocates into the nucleus of cells upon binding of 4-hydroxytamoxifen. In further embodiments of the invention any naturally occurring or engineered derivative of any nuclear receptor, thyroid hormone receptor, retinoic acid receptor, estrogren receptor, estrogen-related receptor, glucocorticoid receptor, progesterone receptor, androgen receptor may be used in inducible systems analogous to the ER based inducible system.

[0273] Another inducible system is based on the design using Transient receptor potential (TRP) ion channel based system inducible by energy, heat or radio-wave (see, e.g., http://www.sciencemag.org/content/336/6081/604). These TRP family proteins respond to different stimuli, including light and heat. When this protein is activated by light or heat, the ion channel will open and allow the entering of ions such as calcium into the plasma membrane. This influx of ions will bind to intracellular ion interacting partners linked to a polypeptide including the guide and the other components of the Cas13 CRISPR-Cas complex or system, and the binding will induce the change of sub-cellular localization of the polypeptide, leading to the entire polypeptide entering the nucleus of cells. Once inside the nucleus, the guide protein and the other components of the Cas13 CRISPR-Cas complex will be active and modulating target gene expression in cells.

[0274] While light activation may be an advantageous embodiment, sometimes it may be disadvantageous especially for in vivo applications in which the light may not penetrate the skin or other organs. In this instance, other methods of energy activation are contemplated, in particular, electric field energy and/or ultrasound which have a similar effect.

[0275] Electric field energy is preferably administered substantially as described in the art, using one or more electric pulses of from about 1 Volt/cm to about 10 kVolts/cm under in vivo conditions. Instead of or in addition to the pulses, the electric field may be delivered in a continuous manner. The electric pulse may be applied for between 1 μs and 500 milliseconds, preferably between 1 μs and 100 milliseconds. The electric field may be applied continuously or in a pulsed manner for 5 about minutes.

[0276] As used herein, ‘electric field energy’ is the electrical energy to which a cell is exposed. Preferably the electric field has a strength of from about 1 Volt/cm to about 10 kVolts/cm or more under in vivo conditions (see WO97/49450).

[0277] As used herein, the term “electric field” includes one or more pulses at variable capacitance and voltage and including exponential and/or square wave and/or modulated wave and/or modulated square wave forms. References to electric fields and electricity should be taken to include reference the presence of an electric potential difference in the environment of a cell. Such an environment may be set up by way of static electricity, alternating current (AC), direct current (DC), etc, as known in the art. The electric field may be uniform, non-uniform or otherwise, and may vary in strength and/or direction in a time dependent manner.

[0278] Single or multiple applications of electric field, as well as single or multiple applications of ultrasound are also possible, in any order and in any combination. The ultrasound and/or the electric field may be delivered as single or multiple continuous applications, or as pulses (pulsatile delivery).

[0279] Electroporation has been used in both in vitro and in vivo procedures to introduce foreign material into living cells. Within vitro applications, a sample of live cells is first mixed with the agent of interest and placed between electrodes such as parallel plates. Then, the electrodes apply an electrical field to the cell/implant mixture. Examples of systems that perform in vitro electroporation include the Electro Cell Manipulator ECM600 product, and the Electro Square Porator T820, both made by the BTX Division of Genetronics, Inc (see U.S. Pat. No. 5,869,326).

[0280] The known electroporation techniques (both in vitro and in vivo) function by applying a brief high voltage pulse to electrodes positioned around the treatment region. The electric field generated between the electrodes causes the cell membranes to temporarily become porous, whereupon molecules of the agent of interest enter the cells. In known electroporation applications, this electric field comprises a single square wave pulse on the order of 1000 V/cm, of about 100 .mu.s duration. Such a pulse may be generated, for example, in known applications of the Electro Square Porator T820.

[0281] Preferably, the electric field has a strength of from about 1 V/cm to about 10 kV/cm under in vitro conditions. Thus, the electric field may have a strength of 1 V/cm, 2 V/cm, 3 V/cm, 4 V/cm, 5 V/cm, 6 V/cm, 7 V/cm, 8 V/cm, 9 V/cm, 10 V/cm, 20 V/cm, 50 V/cm, 100 V/cm, 200 V/cm, 300 V/cm, 400 V/cm, 500 V/cm, 600 V/cm, 700 V/cm, 800 V/cm, 900 V/cm, 1 kV/cm, 2 kV/cm, 5 kV/cm, 10 kV/cm, 20 kV/cm, 50 kV/cm or more. More preferably from about 0.5 kV/cm to about 4.0 kV/cm under in vitro conditions. Preferably the electric field has a strength of from about 1 V/cm to about 10 kV/cm under in vivo conditions. However, the electric field strengths may be lowered where the number of pulses delivered to the target site are increased. Thus, pulsatile delivery of electric fields at lower field strengths is envisaged.

[0282] Preferably the application of the electric field is in the form of multiple pulses such as double pulses of the same strength and capacitance or sequential pulses of varying strength and/or capacitance. As used herein, the term “pulse” includes one or more electric pulses at variable capacitance and voltage and including exponential and/or square wave and/or modulated wave/square wave forms.

[0283] Preferably the electric pulse is delivered as a waveform selected from an exponential wave form, a square wave form, a modulated wave form and a modulated square wave form.

[0284] A preferred embodiment employs direct current at low voltage. Thus, Applicants disclose the use of an electric field which is applied to the cell, tissue or tissue mass at a field strength of between 1V/cm and 20V/cm, for a period of 100 milliseconds or more, preferably 15 minutes or more.

[0285] Ultrasound is advantageously administered at a power level of from about 0.05 W/cm2 to about 100 W/cm2. Diagnostic or therapeutic ultrasound may be used, or combinations thereof.

[0286] As used herein, the term “ultrasound” refers to a form of energy which consists of mechanical vibrations the frequencies of which are so high they are above the range of human hearing. Lower frequency limit of the ultrasonic spectrum may generally be taken as about 20 kHz. Most diagnostic applications of ultrasound employ frequencies in the range 1 and 15 MHz′ (From Ultrasonics in Clinical Diagnosis, P. N. T. Wells, ed., 2nd. Edition, Publ. Churchill Livingstone [Edinburgh, London & NY, 1977]).

[0287] Ultrasound has been used in both diagnostic and therapeutic applications. When used as a diagnostic tool (“diagnostic ultrasound”), ultrasound is typically used in an energy density range of up to about 100 mW/cm2 (FDA recommendation), although energy densities of up to 750 mW/cm2 have been used. In physiotherapy, ultrasound is typically used as an energy source in a range up to about 3 to 4 W/cm2 (WHO recommendation). In other therapeutic applications, higher intensities of ultrasound may be employed, for example, HIFU at 100 W/cm up to 1 kW/cm2 (or even higher) for short periods of time. The term “ultrasound” as used in this specification is intended to encompass diagnostic, therapeutic and focused ultrasound.

[0288] Focused ultrasound (FUS) allows thermal energy to be delivered without an invasive probe (see Morocz et al 1998 Journal of Magnetic Resonance Imaging Vol. 8, No. 1, pp. 136-142. Another form of focused ultrasound is high intensity focused ultrasound (HIFU) which is reviewed by Moussatov et al in Ultrasonics (1998) Vol. 36, No. 8, pp. 893-900 and TranHuuHue et al in Acustica (1997) Vol. 83, No. 6, pp. 1103-1106.

[0289] Preferably, a combination of diagnostic ultrasound and a therapeutic ultrasound is employed. This combination is not intended to be limiting, however, and the skilled reader will appreciate that any variety of combinations of ultrasound may be used. Additionally, the energy density, frequency of ultrasound, and period of exposure may be varied.

[0290] Preferably the exposure to an ultrasound energy source is at a power density of from about 0.05 to about 100 Wcm-2. Even more preferably, the exposure to an ultrasound energy source is at a power density of from about 1 to about 15 Wcm-2.

[0291] Preferably the exposure to an ultrasound energy source is at a frequency of from about 0.015 to about 10.0 MHz. More preferably the exposure to an ultrasound energy source is at a frequency of from about 0.02 to about 5.0 MHz or about 6.0 MHz. Most preferably, the ultrasound is applied at a frequency of 3 MHz.

[0292] Preferably the exposure is for periods of from about 10 milliseconds to about 60 minutes. Preferably the exposure is for periods of from about 1 second to about 5 minutes. More preferably, the ultrasound is applied for about 2 minutes. Depending on the particular target cell to be disrupted, however, the exposure may be for a longer duration, for example, for 15 minutes.

[0293] Advantageously, the target tissue is exposed to an ultrasound energy source at an acoustic power density of from about 0.05 Wcm-2 to about 10 Wcm-2 with a frequency ranging from about 0.015 to about 10 MHz (see WO 98/52609). However, alternatives are also possible, for example, exposure to an ultrasound energy source at an acoustic power density of above 100 Wcm-2, but for reduced periods of time, for example, 1000 Wcm-2 for periods in the millisecond range or less.

[0294] Preferably the application of the ultrasound is in the form of multiple pulses; thus, both continuous wave and pulsed wave (pulsatile delivery of ultrasound) may be employed in any combination. For example, continuous wave ultrasound may be applied, followed by pulsed wave ultrasound, or vice versa. This may be repeated any number of times, in any order and combination. The pulsed wave ultrasound may be applied against a background of continuous wave ultrasound, and any number of pulses may be used in any number of groups.

[0295] Preferably, the ultrasound may comprise pulsed wave ultrasound. In a highly preferred embodiment, the ultrasound is applied at a power density of 0.7 Wcm-2 or 1.25 Wcm-2 as a continuous wave. Higher power densities may be employed if pulsed wave ultrasound is used.

[0296] Use of ultrasound is advantageous as, like light, it may be focused accurately on a target. Moreover, ultrasound is advantageous as it may be focused more deeply into tissues unlike light. It is therefore better suited to whole-tissue penetration (such as but not limited to a lobe of the liver) or whole organ (such as but not limited to the entire liver or an entire muscle, such as the heart) therapy. Another important advantage is that ultrasound is a non-invasive stimulus which is used in a wide variety of diagnostic and therapeutic applications. By way of example, ultrasound is well known in medical imaging techniques and, additionally, in orthopedic therapy. Furthermore, instruments suitable for the application of ultrasound to a subject vertebrate are widely available and their use is well known in the art.

[0297] In particular embodiments, the guide molecule is modified by a secondary structure to increase the specificity of the CRISPR-Cas system and the secondary structure can protect against exonuclease activity and allow for 5′ additions to the guide sequence also referred to herein as a protected guide molecule.

[0298] In one aspect, the invention provides for hybridizing a “protector RNA” to a sequence of the guide molecule, wherein the “protector RNA” is an RNA strand complementary to the 3′ end of the guide molecule to thereby generate a partially double-stranded guide RNA. In an embodiment of the invention, protecting mismatched bases (i.e. the bases of the guide molecule which do not form part of the guide sequence) with a perfectly complementary protector sequence decreases the likelihood of target DNA binding to the mismatched basepairs at the 3′ end. In particular embodiments of the invention, additional sequences comprising an extended length may also be present within the guide molecule such that the guide comprises a protector sequence within the guide molecule. This “protector sequence” ensures that the guide molecule comprises a “protected sequence” in addition to an “exposed sequence” (comprising the part of the guide sequence hybridizing to the target sequence). In particular embodiments, the guide molecule is modified by the presence of the protector guide to comprise a secondary structure such as a hairpin. Advantageously there are three or four to thirty or more, e.g., about 10 or more, contiguous base pairs having complementarity to the protected sequence, the guide sequence or both. It is advantageous that the protected portion does not impede thermodynamics of the CRISPR-Cas system interacting with its target. By providing such an extension including a partially double stranded guide molecule, the guide molecule is considered protected and results in improved specific binding of the CRISPR-Cas complex, while maintaining specific activity.

[0299] In particular embodiments, use is made of a truncated guide (tru-guide), i.e. a guide molecule which comprises a guide sequence which is truncated in length with respect to the canonical guide sequence length. As described by Nowak et al. (Nucleic Acids Res (2016) 44 (20): 9555-9564), such guides may allow catalytically active CRISPR-Cas enzyme to bind its target without cleaving the target DNA. In particular embodiments, a truncated guide is used which allows the binding of the target but retains only nickase activity of the CRISPR-Cas enzyme.

[0300] In particular embodiments of the methods and systems of the present invention, the guide molecule is provided with one or more distinct RNA loop(s) or distinct sequence(s) that can recruit an adaptor protein. A guide molecule may be extended, without colliding with the Cas13 protein by the insertion of distinct RNA loop(s) or distinct sequence(s) that may recruit adaptor proteins that can bind to the distinct RNA loop(s) or distinct sequence(s). Examples of modified guides and their use in recruiting effector domains to the CRISPR-Cas complex are provided in Konermann (Nature 2015, 517(7536): 583-588). In particular embodiments, the aptamer is a minimal hairpin aptamer which selectively binds dimerized MS2 bacteriophage coat proteins in mammalian cells and is introduced into the guide molecule, such as in the stemloop and/or in a tetraloop. In these embodiments, the nucleotide deaminase protein is fused to MS2. The nucleotide deaminase protein is then co-delivered together with the CRISPR-Cas protein and corresponding guide RNA.

[0301] The invention also relates to a method for treating or preventing a disease by the targeted deamination using the AD-functionalized CRISPR system, wherein the deamination of the A, which remedies a disease caused by transcripts containing a pathogenic G→A or C→T point mutation. Examples of disease that can be treated or prevented with the present invention include cancer, Meier-Gorlin syndrome, Seckel syndrome 4, Joubert syndrome 5, Leber congenital amaurosis 10; Charcot-Marie-Tooth disease, type 2; Charcot-Marie-Tooth disease, type 2; Usher syndrome, type 2C; Spinocerebellar ataxia 28; Spinocerebellar ataxia 28; Spinocerebellar ataxia 28; Long QT syndrome 2; Sjögren-Larsson syndrome; Hereditary fructosuria; Hereditary fructosuria; Neuroblastoma; Neuroblastoma; Kallmann syndrome 1; Kallmann syndrome 1; Kallmann syndrome 1; Metachromatic leukodystrophy.

[0302] In particular embodiments, the invention thus comprises compositions for use in therapy. This implies that the methods can be performed in vivo, ex vivo or in vitro. In particular embodiments, the methods are not methods of treatment of the animal or human body or a method for modifying the germ line genetic identity of a human cell. In particular embodiments; when carrying out the method, the target RNA is not comprised within a human or animal cell. In particular embodiments, when the target is a human or animal target, the method is carried out ex vivo or in vitro.

[0303] The invention also relates to a method for knocking-out or knocking-down an undesirable activity of a gene, wherein the deamination of the A at the transcript of the gene results in a loss of function. For example, in one embodiment, the targeted deamination by the AD-functionalized CRISPR system can cause a nonsense mutation resulting in a premature stop codon in an endogenous gene. This may alter the expression of the endogenous gene and can lead to a desirable trait in the edited cell. In another embodiment, the targeted deamination by the AD-functionalized CRISPR system can cause a nonconservative missense mutation resulting in a code for a different amino acid residue in an endogenous gene. This may alter the function of the endogenous gene expressed and can also lead to a desirable trait in the edited cell.

[0304] The guide sequence may comprise one or more mismatch corresponding to different nucleotide sites in the target sequence. In certain cases, guide sequence may comprise multiple mismatches corresponding to different nucleotide sites in the target sequence. In cases where two guide molecules are used, the guide sequence of each of the guide molecules may comprise a mismatch corresponding to a different nucleotide sites in the target sequence.

### CRISPR Development and Use

[0305] The present invention may be further illustrated and extended based on aspects of CRISPR-Cas development and use as set forth in the following articles and particularly as relates to delivery of a CRISPR protein complex and uses of an RNA guided endonuclease in cells and organisms:
[0306] Multiplex genome engineering using CRISPR-Cas systems. Cong, L., Ran, F.A., Cox, D., Lin, S., Barretto, R., Habib, N., Hsu, P.D., Wu, X., Jiang, W., Marraffini, L.A., & Zhang, F. Science February 15; 339(6121):819-23 (2013);
[0307] RNA-guided editing of bacterial genomes using CRISPR-Cas systems. Jiang W., Bikard D., Cox D., Zhang F, Marraffini L A. Nat Biotechnol March; 31(3):233-9 (2013);
[0308] One-Step Generation of Mice Carrying Mutations in Multiple Genes by CRISPR-Cas-Mediated Genome Engineering. Wang H., Yang H., Shivalila C S., Dawlaty M M., Cheng A W., Zhang F., Jaenisch R. Cell May 9; 153(4):910-8 (2013);
[0309] Optical control of mammalian endogenous transcription and epigenetic states. Konermann S, Brigham M D, Trevino A E, Hsu P D, Heidenreich M, Cong L, Platt R J, Scott D A, Church G M, Zhang F. Nature. August 22; 500(7463):472-6. doi: 10.1038/Nature12466. Epub 2013 Aug. 23 (2013);
[0310] Double Nicking by RNA-Guided CRISPR Cas9 for Enhanced Genome Editing Specificity. Ran, F A., Hsu, P D., Lin, C Y., Gootenberg, J S., Konermann, S., Trevino, A E., Scott, D A., Inoue, A., Matoba, S., Zhang, Y., & Zhang, F. Cell August 28. pii: S0092-8674(13)01015-5 (2013-A);
[0311] DNA targeting specificity of RNA-guided Cas9 nucleases. Hsu, P., Scott, D., Weinstein, J., Ran, F A., Konermann, S., Agarwala, V., Li, Y., Fine, E., Wu, X., Shalem, O., Cradick, T J., Marraffini, L A., Bao, G., & Zhang, F. Nat Biotechnol doi:10.1038/nbt.2647 (2013);
[0312] Genome engineering using the CRISPR-Cas9 system. Ran, F A., Hsu, P D., Wright, J., Agarwala, V., Scott, D A., Zhang, F. Nature Protocols November; 8(11):2281-308 (2013-B);
[0313] Genome-Scale CRISPR-Cas9 Knockout Screening in Human Cells. Shalem, O., Sanjana, N E., Hartenian, E., Shi, X., Scott, D A., Mikkelson, T., Heckl, D., Ebert, B L., Root, D E., Doench, J G., Zhang, F. Science December 12. (2013);
[0314] Crystal structure of cas9 in complex with guide RNA and target DNA. Nishimasu, H., Ran, F A., Hsu, P D., Konermann, S., Shehata, S I., Dohmae, N., Ishitani, R., Zhang, F., Nureki, O. Cell February 27, 156(5):935-49 (2014);
[0315] Genome-wide binding of the CRISPR endonuclease Cas9 in mammalian cells. Wu X., Scott D A., Kriz A J., Chiu A C., Hsu P D., Dadon D B., Cheng A W., Trevino A E., Konermann S., Chen S., Jaenisch R., Zhang F., Sharp P A. Nat Biotechnol. April 20. doi: 10.1038/nbt.2889 (2014);
[0316] CRISPR-Cas9 Knockin Mice for Genome Editing and Cancer Modeling. Platt R J, Chen S, Zhou Y, Yim M J, Swiech L, Kempton H R, Dahlman J E, Parnas O, Eisenhaure T M, Jovanovic M, Graham D B, Jhunjhunwala S, Heidenreich M, Xavier R J, Langer R, Anderson D G, Hacohen N, Regev A, Feng G, Sharp P A, Zhang F. Cell 159(2): 440-455 DOI: 10.1016/j.cell.2014.09.014(2014);
[0317] Development and Applications of CRISPR-Cas9 for Genome Engineering, Hsu P D, Lander E S, Zhang F., Cell. June 5; 157(6):1262-78 (2014).
[0318] Genetic screens in human cells using the CRISPR-Cas9 system, Wang T, Wei J J, Sabatini D M, Lander E S., Science. January 3; 343(6166): 80-84. doi:10.1126/science.1246981 (2014);
[0319] Rational design of highly active sgRNAs for CRISPR-Cas9-mediated gene inactivation, Doench J G, Hartenian E, Graham D B, Tothova Z, Hegde M, Smith I, Sullender M, Ebert B L, Xavier R J, Root D E., (published online 3 Sep. 2014) Nat Biotechnol. December; 32(12):1262-7 (2014);
[0320] In vivo interrogation of gene function in the mammalian brain using CRISPR-Cas9, Swiech L, Heidenreich M, Banerjee A, Habib N, Li Y, Trombetta J, Sur M, Zhang F., (published online 19 Oct. 2014) Nat Biotechnol. January; 33(1):102-6 (2015);
[0321] Genome-scale transcriptional activation by an engineered CRISPR-Cas9 complex, Konermann S, Brigham M D, Trevino A E, Joung J, Abudayyeh O O, Barcena C, Hsu P D, Habib N, Gootenberg J S, Nishimasu H, Nureki 0, Zhang F., Nature. January 29; 517(7536):583-8 (2015).
[0322] A split-Cas9 architecture for inducible genome editing and transcription modulation, Zetsche B, Volz S E, Zhang F., (published online 2 Feb. 2015) Nat Biotechnol. February; 33(2):139-42 (2015);
[0323] Genome-wide CRISPR Screen in a Mouse Model of Tumor Growth and Metastasis, Chen S, Sanjana N E, Zheng K, Shalem O, Lee K, Shi X, Scott D A, Song J, Pan J Q, Weissleder R, Lee H, Zhang F, Sharp P A. Cell 160, 1246-1260, Mar. 12, 2015 (multiplex screen in mouse), and
[0324] In vivo genome editing using Staphylococcus aureus Cas9, Ran F A, Cong L, Yan W X, Scott D A, Gootenberg J S, Kriz A J, Zetsche B, Shalem O, Wu X, Makarova K S, Koonin EV, Sharp P A, Zhang F., (published online 1 Apr. 2015), Nature. April 9; 520(7546):186-91 (2015).
[0325] Shalem et al., “High-throughput functional genomics using CRISPR-Cas9,” Nature Reviews Genetics 16, 299-311 (May 2015).
[0326] Xu et al., “Sequence determinants of improved CRISPR sgRNA design,” Genome Research 25, 1147-1157 (August 2015).
[0327] Parnas et al., “A Genome-wide CRISPR Screen in Primary Immune Cells to Dissect Regulatory Networks,” Cell 162, 675-686 (Jul. 30, 2015).
[0328] Ramanan et al., CRISPR-Cas9 cleavage of viral DNA efficiently suppresses hepatitis B virus,” Scientific Reports 5:10833. doi: 10.1038/srep10833 (Jun. 2, 2015)
[0329] Nishimasu et al., Crystal Structure of Staphylococcus aureus Cas9,” Cell 162, 1113-1126 (Aug. 27, 2015)
[0330] BCL11A enhancer dissection by Cas9-mediated in situ saturating mutagenesis, Canver et al., Nature 527(7577):192-7 (Nov. 12, 2015) doi: 10.1038/nature15521. Epub 2015 Sep. 16.
[0331] Cas13 Is a Single RNA-Guided Endonuclease of a Class 2 CRISPR-Cas System, Zetsche et al., Cell 163, 759-71 (Sep. 25, 2015).
[0332] Discovery and Functional Characterization of Diverse Class 2 CRISPR-Cas Systems, Shmakov et al., Molecular Cell, 60(3), 385-397 doi: 10.1016/j.molcel.2015.10.008 Epub Oct. 22, 2015.
[0333] Rationally engineered Cas9 nucleases with improved specificity, Slaymaker et al., Science 2016 Jan. 1 351(6268): 84-88 doi: 10.1126/science.aad5227. Epub 2015 Dec. 1.
[0334] Gao et al, “Engineered Cas13 Enzymes with Altered PAM Specificities,” bioRxiv 091611; doi: http://dx.doi.org/10.1101/091611 (Dec. 4, 2016). each of which is incorporated herein by reference, may be considered in the practice of the instant invention, and discussed briefly below:
[0335] Cong et al. engineered type II CRISPR-Cas systems for use in eukaryotic cells based on both Streptococcus thermophilus Cas9 and also Streptococcus pyogenes Cas9 and demonstrated that Cas9 nucleases can be directed by short RNAs to induce precise cleavage of DNA in human and mouse cells. Their study further showed that Cas9 as converted into a nicking enzyme can be used to facilitate homology-directed repair in eukaryotic cells with minimal mutagenic activity. Additionally, their study demonstrated that multiple guide sequences can be encoded into a single CRISPR array to enable simultaneous editing of several at endogenous genomic loci sites within the mammalian genome, demonstrating easy programmability and wide applicability of the RNA-guided nuclease technology. This ability to use RNA to program sequence specific DNA cleavage in cells defined a new class of genome engineering tools. These studies further showed that other CRISPR loci are likely to be transplantable into mammalian cells and can also mediate mammalian genome cleavage. Importantly, it can be envisaged that several aspects of the CRISPR-Cas system can be further improved to increase its efficiency and versatility.
[0336] Jiang et al. used the clustered, regularly interspaced, short palindromic repeats (CRISPR)-associated Cas9 endonuclease complexed with dual-RNAs to introduce precise mutations in the genomes of Streptococcus pneumoniae and Escherichia coli. The approach relied on dual-RNA:Cas9-directed cleavage at the targeted genomic site to kill unmutated cells and circumvents the need for selectable markers or counter-selection systems. The study reported reprogramming dual-RNA:Cas9 specificity by changing the sequence of short CRISPR RNA (crRNA) to make single- and multinucleotide changes carried on editing templates. The study showed that simultaneous use of two crRNAs enabled multiplex mutagenesis. Furthermore, when the approach was used in combination with recombineering, in S. pneumoniae, nearly 100% of cells that were recovered using the described approach contained the desired mutation, and in E. coli, 65% that were recovered contained the mutation.
[0337] Wang et al. (2013) used the CRISPR-Cas system for the one-step generation of mice carrying mutations in multiple genes which were traditionally generated in multiple steps by sequential recombination in embryonic stem cells and/or time-consuming intercrossing of mice with a single mutation. The CRISPR-Cas system will greatly accelerate the in vivo study of functionally redundant genes and of epistatic gene interactions.
[0338] Konermann et al. (2013) addressed the need in the art for versatile and robust technologies that enable optical and chemical modulation of DNA-binding domains based CRISPR Cas9 enzyme and also Transcriptional Activator Like Effectors
[0339] Ran et al. (2013-A) described an approach that combined a Cas9 nickase mutant with paired guide RNAs to introduce targeted double-strand breaks. This addresses the issue of the Cas9 nuclease from the microbial CRISPR-Cas system being targeted to specific genomic loci by a guide sequence, which can tolerate certain mismatches to the DNA target and thereby promote undesired off-target mutagenesis. Because individual nicks in the genome are repaired with high fidelity, simultaneous nicking via appropriately offset guide RNAs is required for double-stranded breaks and extends the number of specifically recognized bases for target cleavage. The authors demonstrated that using paired nicking can reduce off-target activity by 50- to 1,500-fold in cell lines and to facilitate gene knockout in mouse zygotes without sacrificing on-target cleavage efficiency. This versatile strategy enables a wide variety of genome editing applications that require high specificity.
[0340] Hsu et al. (2013) characterized SpCas9 targeting specificity in human cells to inform the selection of target sites and avoid off-target effects. The study evaluated >700 guide RNA variants and SpCas9-induced indel mutation levels at >100 predicted genomic off-target loci in 293T and 293FT cells. The authors that SpCas9 tolerates mismatches between guide RNA and target DNA at different positions in a sequence-dependent manner, sensitive to the number, position and distribution of mismatches. The authors further showed that SpCas9-mediated cleavage is unaffected by DNA methylation and that the dosage of SpCas9 and guide RNA can be titrated to minimize off-target modification. Additionally, to facilitate mammalian genome engineering applications, the authors reported providing a web-based software tool to guide the selection and validation of target sequences as well as off-target analyses.
[0341] Ran et al. (2013-B) described a set of tools for Cas9-mediated genome editing via non-homologous end joining (NHEJ) or homology-directed repair (HDR) in mammalian cells, as well as generation of modified cell lines for downstream functional studies. To minimize off-target cleavage, the authors further described a double-nicking strategy using the Cas9 nickase mutant with paired guide RNAs. The protocol provided by the authors experimentally derived guidelines for the selection of target sites, evaluation of cleavage efficiency and analysis of off-target activity. The studies showed that beginning with target design, gene modifications can be achieved within as little as 1-2 weeks, and modified clonal cell lines can be derived within 2-3 weeks.
[0342] Shalem et al. described a new way to interrogate gene function on a genome-wide scale. Their studies showed that delivery of a genome-scale CRISPR-Cas9 knockout (GeCKO) library targeted 18,080 genes with 64,751 unique guide sequences enabled both negative and positive selection screening in human cells. First, the authors showed use of the GeCKO library to identify genes essential for cell viability in cancer and pluripotent stem cells. Next, in a melanoma model, the authors screened for genes whose loss is involved in resistance to vemurafenib, a therapeutic that inhibits mutant protein kinase BRAF. Their studies showed that the highest-ranking candidates included previously validated genes NF1 and MED12 as well as novel hits NF2, CUL3, TADA2B, and TADA1. The authors observed a high level of consistency between independent guide RNAs targeting the same gene and a high rate of hit confirmation, and thus demonstrated the promise of genome-scale screening with Cas9.
[0343] Nishimasu et al. reported the crystal structure of Streptococcus pyogenes Cas9 in complex with sgRNA and its target DNA at 2.5 A° resolution. The structure revealed a bilobed architecture composed of target recognition and nuclease lobes, accommodating the sgRNA:DNAn RNA duplex in a positively charged groove at their interface. Whereas the recognition lobe is essential for binding sgRNA and DNA, the nuclease lobe contains the HNH and RuvC nuclease domains, which are properly positioned for cleavage of the complementary and non-complementary strands of the target DNA, respectively. The nuclease lobe also contains a carboxyl-terminal domain responsible for the interaction with the protospacer adjacent motif (PAM). This high-resolution structure and accompanying functional analyses have revealed the molecular mechanism of RNA-guided DNA targeting by Cas9, thus paving the way for the rational design of new, versatile genome-editing technologies.
[0344] Wu et al. mapped genome-wide binding sites of a catalytically inactive Cas9 (dCas9) from Streptococcus pyogenes loaded with single guide RNAs (sgRNAs) in mouse embryonic stem cells (mESCs). The authors showed that each of the four sgRNAs tested targets dCas9 to between tens and thousands of genomic sites, frequently characterized by a 5-nucleotide seed region in the sgRNA and an NGG protospacer adjacent motif (PAM). Chromatin inaccessibility decreases dCas9 binding to other sites with matching seed sequences; thus 70% of off-target sites are associated with genes. The authors showed that targeted sequencing of 295 dCas9 binding sites in mESCs transfected with catalytically active Cas9 identified only one site mutated above background levels. The authors proposed a two-state model for Cas9 binding and cleavage, in which a seed match triggers binding but extensive pairing with target DNA is required for cleavage.
[0345] Platt et al. established a Cre-dependent Cas9 knockin mouse. The authors demonstrated in vivo as well as ex vivo genome editing using adeno-associated virus (AAV)-, lentivirus-, or particle-mediated delivery of guide RNA in neurons, immune cells, and endothelial cells.
[0346] Hsu et al. (2014) is a review article that discusses generally CRISPR-Cas9 history from yogurt to genome editing, including genetic screening of cells.
[0347] Wang et al. (2014) relates to a pooled, loss-of-function genetic screening approach suitable for both positive and negative selection that uses a genome-scale lentiviral single guide RNA (sgRNA) library.
[0348] Doench et al. created a pool of sgRNAs, tiling across all possible target sites of a panel of six endogenous mouse and three endogenous human genes and quantitatively assessed their ability to produce null alleles of their target gene by antibody staining and flow cytometry. The authors showed that optimization of the PAM improved activity and also provided an on-line tool for designing sgRNAs.
[0349] Swiech et al. demonstrate that AAV-mediated SpCas9 genome editing can enable reverse genetic studies of gene function in the brain.
[0350] Konermann et al. (2015) discusses the ability to attach multiple effector domains, e.g., transcriptional activator, functional and epigenomic regulators at appropriate positions on the guide such as stem or tetraloop with and without linkers.
[0351] Zetsche et al. demonstrates that the Cas9 enzyme can be split into two and hence the assembly of Cas9 for activation can be controlled.
[0352] Chen et al. relates to multiplex screening by demonstrating that a genome-wide in vivo CRISPR-Cas9 screen in mice reveals genes regulating lung metastasis.
[0353] Ran et al. (2015) relates to SaCas9 and its ability to edit genomes and demonstrates that one cannot extrapolate from biochemical assays.
[0354] Shalem et al. (2015) described ways in which catalytically inactive Cas9 (dCas9) fusions are used to synthetically repress (CRISPRi) or activate (CRISPRa) expression, showing. advances using Cas9 for genome-scale screens, including arrayed and pooled screens, knockout approaches that inactivate genomic loci and strategies that modulate transcriptional activity.
[0355] Xu et al. (2015) assessed the DNA sequence features that contribute to single guide RNA (sgRNA) efficiency in CRISPR-based screens. The authors explored efficiency of CRISPR-Cas9 knockout and nucleotide preference at the cleavage site. The authors also found that the sequence preference for CRISPRi/a is substantially different from that for CRISPR-Cas9 knockout.
[0356] Parnas et al. (2015) introduced genome-wide pooled CRISPR-Cas9 libraries into dendritic cells (DCs) to identify genes that control the induction of tumor necrosis factor (Tnf) by bacterial lipopolysaccharide (LPS). Known regulators of Tlr4 signaling and previously unknown candidates were identified and classified into three functional modules with distinct effects on the canonical responses to LPS.
[0357] Ramanan et al (2015) demonstrated cleavage of viral episomal DNA (cccDNA) in infected cells. The HBV genome exists in the nuclei of infected hepatocytes as a 3.2 kb double-stranded episomal DNA species called covalently closed circular DNA (cccDNA), which is a key component in the HBV life cycle whose replication is not inhibited by current therapies. The authors showed that sgRNAs specifically targeting highly conserved regions of HBV robustly suppresses viral replication and depleted cccDNA.
[0358] Nishimasu et al. (2015) reported the crystal structures of SaCas9 in complex with a single guide RNA (sgRNA) and its double-stranded DNA targets, containing the 5′-TTGAAT-3′ PAM and the 5′-TTGGGT-3′ PAM. A structural comparison of SaCas9 with SpCas9 highlighted both structural conservation and divergence, explaining their distinct PAM specificities and orthologous sgRNA recognition.
[0359] Canver et al. (2015) demonstrated a CRISPR-Cas9-based functional investigation of non-coding genomic elements. The authors we developed pooled CRISPR-Cas9 guide RNA libraries to perform in situ saturating mutagenesis of the human and mouse BCL11A enhancers which revealed critical features of the enhancers.
[0360] Zetsche et al. (2015) reported characterization of Cas13, a class 2 CRISPR nuclease from Francisella novicida U112 having features distinct from Cas9. Cas13 is a single RNA-guided endonuclease lacking tracrRNA, utilizes a T-rich protospacer-adjacent motif, and cleaves DNA via a staggered DNA double-stranded break.
[0361] Shmakov et al. (2015) reported three distinct Class 2 CRISPR-Cas systems. Two system CRISPR enzymes (C2c1 and C2c3) contain RuvC-like endonuclease domains distantly related to Cas13. Unlike Cas13, C2c1 depends on both crRNA and tracrRNA for DNA cleavage. The third enzyme (C2c2) contains two predicted HEPN RNase domains and is tracrRNA independent.
[0362] Slaymaker et al (2016) reported the use of structure-guided protein engineering to improve the specificity of Streptococcus pyogenes Cas9 (SpCas9). The authors developed “enhanced specificity” SpCas9 (eSpCas9) variants which maintained robust on-target cleavage with reduced off-target effects.

[0363] The methods and tools provided herein are exemplified for Cas13, a type II nuclease that does not make use of tracrRNA. Orthologs of Cas13 have been identified in different bacterial species as described herein. Further type II nucleases with similar properties can be identified using methods described in the art (Shmakov et al. 2015, 60:385-397; Abudayeh et al. 2016, Science, 5; 353(6299)). In particular embodiments, such methods for identifying novel CRISPR effector proteins may comprise the steps of selecting sequences from the database encoding a seed which identifies the presence of a CRISPR Cas locus, identifying loci located within 10 kb of the seed comprising Open Reading Frames (ORFs) in the selected sequences, selecting therefrom loci comprising ORFs of which only a single ORF encodes a novel CRISPR effector having greater than 700 amino acids and no more than 90% homology to a known CRISPR effector. In particular embodiments, the seed is a protein that is common to the CRISPR-Cas system, such as Cas1. In further embodiments, the CRISPR array is used as a seed to identify new effector proteins.

[0364] The effectiveness of the present invention has been demonstrated. Preassembled recombinant CRISPR-Cas13 complexes comprising Cas13 and crRNA may be transfected, for example by electroporation, resulting in high mutation rates and absence of detectable off-target mutations. Hur, J. K. et al, Targeted mutagenesis in mice by electroporation of Cas13 ribonucleoproteins, Nat Biotechnol. 2016 Jun. 6. doi: 10.1038/nbt.3596. Genome-wide analyses shows that Cas13 is highly specific. By one measure, in vitro cleavage sites determined for Cas13 in human HEK293T cells were significantly fewer that for SpCas9. Kim, D. et al., Genome-wide analysis reveals specificities of Cas13 endonucleases in human cells, Nat Biotechnol. 2016 Jun. 6. doi: 10.1038/nbt.3609. An efficient multiplexed system employing Cas13 has been demonstrated in Drosophila employing gRNAs processed from an array containing inventing tRNAs. Port, F. et al, Expansion of the CRISPR toolbox in an animal with tRNA-flanked Cas9 and Cas13 gRNAs. doi: http://dx.doi.org/10.1101/046417.

[0365] Also, “Dimeric CRISPR RNA-guided FokI nucleases for highly specific genome editing”, Shengdar Q. Tsai, Nicolas Wyvekens, Cyd Khayter, Jennifer A. Foden, Vishal Thapar, Deepak Reyon, Mathew J. Goodwin, Martin J. Aryee, J. Keith Joung Nature Biotechnology 32(6): 569-77 (2014), relates to dimeric RNA-guided Fold Nucleases that recognize extended sequences and can edit endogenous genes with high efficiencies in human cells.

[0366] With respect to general information on CRISPR/Cas Systems, components thereof, and delivery of such components, including methods, materials, delivery vehicles, vectors, particles, and making and using thereof, including as to amounts and formulations, as well as CRISPR-Cas-expressing eukaryotic cells, CRISPR-Cas expressing eukaryotes, such as a mouse, reference is made to: U.S. Pat. Nos. 8,999,641, 8,993,233, 8,697,359, 8,771,945, 8,795,965, 8,865,406, 8,871,445, 8,889,356, 8,889,418, 8,895,308, 8,906,616, 8,932,814, and 8,945,839; US Patent Publications US 2014-0310830 (U.S. application Ser. No. 14/105,031), US 2014-0287938 A1 (U.S. application Ser. No. 14/213,991), US 2014-0273234 A1 (U.S. application Ser. No. 14/293,674), US2014-0273232 A1 (U.S. application Ser. No. 14/290,575), US 2014-0273231 (U.S. application Ser. No. 14/259,420), US 2014-0256046 A1 (U.S. application Ser. No. 14/226,274), US 2014-0248702 A1 (U.S. application Ser. No. 14/258,458), US 2014-0242700 A1 (U.S. application Ser. No. 14/222,930), US 2014-0242699 A1 (U.S. application Ser. No. 14/183,512), US 2014-0242664 A1 (U.S. application Ser. No. 14/104,990), US 2014-0234972 A1 (U.S. application Ser. No. 14/183,471), US 2014-0227787 A1 (U.S. application Ser. No. 14/256,912), US 2014-0189896 A1 (U.S. application Ser. No. 14/105,035), US 2014-0186958 (U.S. application Ser. No. 14/105,017), US 2014-0186919 A1 (U.S. application Ser. No. 14/104,977), US 2014-0186843 A1 (U.S. application Ser. No. 14/104,900), US 2014-0179770 A1 (U.S. application Ser. No. 14/104,837) and US 2014-0179006 A1 (U.S. application Ser. No. 14/183,486), US 2014-0170753 (U.S. application Ser. No. 14/183,429); US 2015-0184139 (U.S. application Ser. No. 14/324,960); Ser. No. 14/054,414 European Patent Applications EP 2 771 468 (EP13818570.7), EP 2 764 103 (EP13824232.6), and EP 2 784 162 (EP14170383.5); and PCT Patent Publications WO2014/093661 (PCT/US2013/074743), WO2014/093694 (PCT/US2013/074790), WO2014/093595 (PCT/US2013/074611), WO2014/093718 (PCT/US2013/074825), WO2014/093709 (PCT/US2013/074812), WO2014/093622 (PCT/US2013/074667), WO2014/093635 (PCT/US2013/074691), WO2014/093655 (PCT/US2013/074736), WO2014/093712 (PCT/US2013/074819), WO2014/093701 (PCT/US2013/074800), WO2014/018423 (PCT/US2013/051418), WO2014/204723 (PCT/US2014/041790), WO2014/204724 (PCT/US2014/041800), WO2014/204725 (PCT/US2014/041803), WO2014/204726 (PCT/US2014/041804), WO2014/204727 (PCT/US2014/041806), WO2014/204728 (PCT/US2014/041808), WO2014/204729 (PCT/US2014/041809), WO2015/089351 (PCT/US2014/069897), WO2015/089354 (PCT/US2014/069902), WO2015/089364 (PCT/US2014/069925), WO2015/089427 (PCT/US2014/070068), WO2015/089462 (PCT/US2014/070127), WO2015/089419 (PCT/US2014/070057), WO2015/089465 (PCT/US2014/070135), WO2015/089486 (PCT/US2014/070175), WO2015/058052 (PCT/US2014/061077), WO2015/070083 (PCT/US2014/064663), WO2015/089354 (PCT/US2014/069902), WO2015/089351 (PCT/US2014/069897), WO2015/089364 (PCT/US2014/069925), WO2015/089427 (PCT/US2014/070068), WO2015/089473 (PCT/US2014/070152), WO2015/089486 (PCT/US2014/070175), WO2016/049258 (PCT/US2015/051830), WO2016/094867 (PCT/US2015/065385), WO2016/094872 (PCT/US2015/065393), WO2016/094874 (PCT/US2015/065396), WO2016/106244 (PCT/US2015/067177).

[0367] Mention is also made of U.S. application 62/180,709, 17 Jun. 15, PROTECTED GUIDE RNAS (PGRNAS); U.S. application 62/091,455, filed, 12 Dec. 2014, PROTECTED GUIDE RNAS (PGRNAS); U.S. application 62/096,708, 24 Dec. 2014, PROTECTED GUIDE RNAS (PGRNAS); U.S. applications 62/091,462, 12 Dec. 2014, 62/096,324, 23 Dec. 2014, 62/180,681, 17 Jun. 2015, and 62/237,496, 5 Oct. 2015, DEAD GUIDES FOR CRISPR TRANSCRIPTION FACTORS; U.S. application 62/091,456, 12 Dec. 2014 and 62/180,692, 17 Jun. 2015, ESCORTED AND FUNCTIONALIZED GUIDES FOR CRISPR-CAS SYSTEMS; U.S. application 62/091,461, 12 Dec. 14, DELIVERY, USE AND THERAPEUTIC APPLICATIONS OF THE CRISPR-CAS SYSTEMS AND COMPOSITIONS FOR GENOME EDITING AS TO HEMATOPOETIC STEM CELLS (HSCs); U.S. application 62/094,903, 19 Dec. 2014, UNBIASED IDENTIFICATION OF DOUBLE-STRAND BREAKS AND GENOMIC REARRANGEMENT BY GENOME-WISE INSERT CAPTURE SEQUENCING; U.S. application 62/096,761, 24 Dec. 2014, ENGINEERING OF SYSTEMS, METHODS AND OPTIMIZED ENZYME AND GUIDE SCAFFOLDS FOR SEQUENCE MANIPULATION; U.S. application 62/098,059, 30 Dec. 2014, 62/181,641, 18 Jun. 2015, and 62/181,667, 18 Jun. 2015, RNA-TARGETING SYSTEM; U.S. application 62/096,656, 24 Dec. 2014 and 62/181,151, 17 Jun. 2015, CRISPR HAVING OR ASSOCIATED WITH DESTABILIZATION DOMAINS; U.S. application 62/096,697, 24 Dec. 2014, CRISPR HAVING OR ASSOCIATED WITH AAV; U.S. application 62/098,158, 30 Dec. 2014, ENGINEERED CRISPR COMPLEX INSERTIONAL TARGETING SYSTEMS; U.S. application 62/151,052, 22 Apr. 2015, CELLULAR TARGETING FOR EXTRACELLULAR EXOSOMAL REPORTING; U.S. application 62/054,490, 24 Sep. 2014, DELIVERY, USE AND THERAPEUTIC APPLICATIONS OF THE CRISPR-CAS SYSTEMS AND COMPOSITIONS FOR TARGETING DISORDERS AND DISEASES USING PARTICLE DELIVERY COMPONENTS; U.S. application 61/939,154, 12 Feb. 14, SYSTEMS, METHODS AND COMPOSITIONS FOR SEQUENCE MANIPULATION WITH OPTIMIZED FUNCTIONAL CRISPR-CAS SYSTEMS; U.S. application 62/055,484, 25 Sep. 2014, SYSTEMS, METHODS AND COMPOSITIONS FOR SEQUENCE MANIPULATION WITH OPTIMIZED FUNCTIONAL CRISPR-CAS SYSTEMS; U.S. application 62/087,537, 4 Dec. 2014, SYSTEMS, METHODS AND COMPOSITIONS FOR SEQUENCE MANIPULATION WITH OPTIMIZED FUNCTIONAL CRISPR-CAS SYSTEMS; U.S. application 62/054,651, 24 Sep. 2014, DELIVERY, USE AND THERAPEUTIC APPLICATIONS OF THE CRISPR-CAS SYSTEMS AND COMPOSITIONS FOR MODELING COMPETITION OF MULTIPLE CANCER MUTATIONS IN VIVO; U.S. application 62/067,886, 23 Oct. 2014, DELIVERY, USE AND THERAPEUTIC APPLICATIONS OF THE CRISPR-CAS SYSTEMS AND COMPOSITIONS FOR MODELING COMPETITION OF MULTIPLE CANCER MUTATIONS IN VIVO; U.S. applications 62/054,675, 24 Sep. 2014 and 62/181,002, 17 Jun. 2015, DELIVERY, USE AND THERAPEUTIC APPLICATIONS OF THE CRISPR-CAS SYSTEMS AND COMPOSITIONS IN NEURONAL CELLS/TISSUES; U.S. application 62/054,528, 24 Sep. 2014, DELIVERY, USE AND THERAPEUTIC APPLICATIONS OF THE CRISPR-CAS SYSTEMS AND COMPOSITIONS IN IMMUNE DISEASES OR DISORDERS; U.S. application 62/055,454, 25 Sep. 2014, DELIVERY, USE AND THERAPEUTIC APPLICATIONS OF THE CRISPR-CAS SYSTEMS AND COMPOSITIONS FOR TARGETING DISORDERS AND DISEASES USING CELL PENETRATION PEPTIDES (CPP); U.S. application 62/055,460, 25 Sep. 2014, MULTIFUNCTIONAL-CRISPR COMPLEXES AND/OR OPTIMIZED ENZYME LINKED FUNCTIONAL-CRISPR COMPLEXES; U.S. application 62/087,475, 4 Dec. 2014 and 62/181,690, 18 Jun. 2015, FUNCTIONAL SCREENING WITH OPTIMIZED FUNCTIONAL CRISPR-CAS SYSTEMS; U.S. application 62/055,487, 25 Sep. 2014, FUNCTIONAL SCREENING WITH OPTIMIZED FUNCTIONAL CRISPR-CAS SYSTEMS; U.S. application 62/087,546, 4 Dec. 2014 and 62/181,687, 18 Jun. 2015, MULTIFUNCTIONAL CRISPR COMPLEXES AND/OR OPTIMIZED ENZYME LINKED FUNCTIONAL-CRISPR COMPLEXES; and U.S. application 62/098,285, 30 Dec. 2014, CRISPR MEDIATED IN VIVO MODELING AND GENETIC SCREENING OF TUMOR GROWTH AND METASTASIS.

[0368] Mention is made of U.S. applications 62/181,659, 18 Jun. 2015 and 62/207,318, 19 Aug. 2015, ENGINEERING AND OPTIMIZATION OF SYSTEMS, METHODS, ENZYME AND GUIDE SCAFFOLDS OF CAS9 ORTHOLOGS AND VARIANTS FOR SEQUENCE MANIPULATION. Mention is made of U.S. applications 62/181,663, 18 Jun. 2015 and 62/245,264, 22 Oct. 2015, NOVEL CRISPR ENZYMES AND SYSTEMS, U.S. applications 62/181,675, 18 Jun. 2015, 62/285,349, 22 Oct. 2015, 62/296,522, 17 Feb. 2016, and 62/320,231, 8 Apr. 2016, NOVEL CRISPR ENZYMES AND SYSTEMS, U.S. application 62/232,067, 24 Sep. 2015, U.S. application Ser. No. 14/975,085, 18 Dec. 2015, European application No. 16150428.7, U.S. application 62/205,733, 16 Aug. 2015, U.S. application 62/201,542, 5 Aug. 2015, U.S. application 62/193,507, 16 Jul. 2015, and U.S. application 62/181,739, 18 Jun. 2015, each entitled NOVEL CRISPR ENZYMES AND SYSTEMS and of U.S. application 62/245,270, 22 Oct. 2015, NOVEL CRISPR ENZYMES AND SYSTEMS. Mention is also made of U.S. application 61/939,256, 12 Feb. 2014, and WO 2015/089473 (PCT/US2014/070152), 12 Dec. 2014, each entitled ENGINEERING OF SYSTEMS, METHODS AND OPTIMIZED GUIDE COMPOSITIONS WITH NEW ARCHITECTURES FOR SEQUENCE MANIPULATION. Mention is also made of PCT/US2015/045504, 15 Aug. 2015, U.S. application 62/180,699, 17 Jun. 2015, and U.S. application 62/038,358, 17 Aug. 2014, each entitled GENOME EDITING USING CAS9 NICKASES.

[0369] Each of these patents, patent publications, and applications, and all documents cited therein or during their prosecution (“appln cited documents”) and all documents cited or referenced in the appln cited documents, together with any instructions, descriptions, product specifications, and product sheets for any products mentioned therein or in any document therein and incorporated by reference herein, are hereby incorporated herein by reference, and may be employed in the practice of the invention. All documents (e.g., these patents, patent publications and applications and the appln cited documents) are incorporated herein by reference to the same extent as if each individual document was specifically and individually indicated to be incorporated by reference.

### Adenosine Deaminase

[0370] The systems herein may comprise an adenosine deaminase protein or a catalytic domain thereof, or a nucleotide sequence encoding the adenosine deaminase protein or the catalytic domain. The term “adenosine deaminase” or “adenosine deaminase protein” as used herein refers to a protein, a polypeptide, or one or more functional domain(s) of a protein or a polypeptide that is capable of catalyzing a hydrolytic deamination reaction that converts an adenine (or an adenine moiety of a molecule) to a hypoxanthine (or a hypoxanthine moiety of a molecule), as shown below. In some embodiments, the adenine-containing molecule is an adenosine (A), and the hypoxanthine-containing molecule is an inosine (I). The adenine-containing molecule can be deoxyribonucleic acid (DNA) or ribonucleic acid (RNA).

[chemical structure]

[0371] According to the present disclosure, adenosine deaminases that can be used in connection with the present disclosure include, but are not limited to, members of the enzyme family known as adenosine deaminases that act on RNA (ADARs), members of the enzyme family known as adenosine deaminases that act on tRNA (ADATs), and other adenosine deaminase domain-containing (ADAD) family members. According to the present disclosure, the adenosine deaminase is capable of targeting adenine in a RNA/DNA and RNA duplexes. Indeed, Zheng et al. (Nucleic Acids Res. 2017, 45(6): 3369-3377) demonstrate that ADARs can carry out adenosine to inosine editing reactions on RNA/DNA and RNA/RNA duplexes. In particular embodiments, the adenosine deaminase has been modified to increase its ability to edit DNA in a RNA/DNAn RNA duplex as detailed herein below.

[0372] In some embodiments, the adenosine deaminase is derived from one or more metazoa species, including but not limited to, mammals, birds, frogs, squids, fish, flies and worms. In some embodiments, the adenosine deaminase is a human, cephalopod (e.g., squid). or Drosophila adenosine deaminase. In certain examples, the adenosine deaminase is a human adenosine deaminase. In certain examples, the adenosine deaminase is a cephalopod adenosine deaminase. In certain examples, the adenosine deaminase is a Drosophila adenosine deaminase.

[0373] In some embodiments, the adenosine deaminase is a human ADAR, including hADAR1, hADAR2, hADAR3. In some cases, the adenosine deaminase is hADAR1. In some cases, the adenosine deaminase is hADAR2. In some cases, the adenosine deaminase is hADAR3. In some embodiments, the adenosine deaminase is a Caenorhabditis elegans ADAR protein, including ADR-1 and ADR-2. In some embodiments, the adenosine deaminase is a Drosophila ADAR protein, including dAdar. In some embodiments, the adenosine deaminase is a squid Loligo pealeii ADAR protein, including sqADAR2a and sqADAR2b. In some embodiments, the adenosine deaminase is a human ADAT protein. In some embodiments, the adenosine deaminase is a Drosophila ADAT protein. In some embodiments, the adenosine deaminase is a human ADAD protein, including TENR (hADAD1) and TENRL (hADAD2).

[0374] In some embodiments, the adenosine deaminase protein is an RNA-specific adenosine deaminase. For example, the adenosine deaminase protein or catalytic domain thereof is an RNA-specific adenosine deaminase and/or is a human, cephalopod, or Drosophila adenosine deaminase protein or catalytic domain thereof, preferably ADAR, optionally huADAR, optionally (hu)ADAR1 or (hu)ADAR2, preferably huADAR2 or catalytic domain thereof.

[0375] In some embodiments, the adenosine deaminase protein recognizes and converts one or more target adenosine residue(s) in a double-stranded nucleic acid substrate into inosine residues (s). In some embodiments, the double-stranded nucleic acid substrate is a RNA-DNA hybrid duplex. In some embodiments, the adenosine deaminase protein recognizes a binding window on the double-stranded substrate. In some embodiments, the binding window contains at least one target adenosine residue(s). In some embodiments, the binding window is in the range of about 3 bp to about 100 bp. In some embodiments, the binding window is in the range of about 5 bp to about 50 bp. In some embodiments, the binding window is in the range of about 10 bp to about 30 bp. In some embodiments, the binding window is about 1 bp, 2 bp, 3 bp, 5 bp, 7 bp, 10 bp, 15 bp, 20 bp, 25 bp, 30 bp, 40 bp, 45 bp, 50 bp, 55 bp, 60 bp, 65 bp, 70 bp, 75 bp, 80 bp, 85 bp, 90 bp, 95 bp, or 100 bp.

[0376] In some embodiments, the adenosine deaminase protein comprises one or more deaminase domains. Not intended to be bound by theory, it is contemplated that the deaminase domain functions to recognize and convert one or more target adenosine (A) residue(s) contained in a double-stranded nucleic acid substrate into inosine (I) residues (s). In some embodiments, the deaminase domain comprises an active center. In some embodiments, the active center comprises a zinc ion. In some embodiments, during the A-to-I editing process, base pairing at the target adenosine residue is disrupted, and the target adenosine residue is “flipped” out of the double helix to become accessible by the adenosine deaminase. In some embodiments, amino acid residues in or near the active center interact with one or more nucleotide(s) 5′ to a target adenosine residue. In some embodiments, amino acid residues in or near the active center interact with one or more nucleotide(s) 3′ to a target adenosine residue. In some embodiments, amino acid residues in or near the active center further interact with the nucleotide complementary to the target adenosine residue on the opposite strand. In some embodiments, the amino acid residues form hydrogen bonds with the 2′ hydroxyl group of the nucleotides.

[0377] In some embodiments, the adenosine deaminase comprises human ADAR2 full protein (hADAR2) or the deaminase domain thereof (hADAR2-D). In some embodiments, the adenosine deaminase is an ADAR family member that is homologous to hADAR2 or hADAR2-D.

[0378] Particularly, in some embodiments, the homologous ADAR protein is human ADAR1 (hADAR1) or the deaminase domain thereof (hADAR1-D). In some embodiments, glycine 1007 of hADAR1-D corresponds to glycine 487 hADAR2-D, and glutamic Acid 1008 of hADAR1-D corresponds to glutamic acid 488 of hADAR2-D.

[0379] In some embodiments, the adenosine deaminase comprises the wild-type amino acid sequence of hADAR2-D. In some embodiments, the adenosine deaminase comprises one or more mutations in the hADAR2-D sequence, such that the editing efficiency, and/or substrate editing preference of hADAR2-D is changed according to specific needs.

[0380] Certain mutations of hADAR1 and hADAR2 proteins have been described in Kuttan et al., Proc Natl Acad Sci USA. (2012) 109(48):E3295-304; Want et al. ACS Chem Biol. (2015) 10(11):2512-9; and Zheng et al. Nucleic Acids Res. (2017) 45(6):3369-337, each of which is incorporated herein by reference in its entirety.

[0381] In some embodiments, the adenosine deaminase comprises a mutation at glycine336 of the hADAR2-D amino acid sequence, or a corresponding position in a homologous ADAR protein. In some embodiments, the glycine residue at position 336 is replaced by an aspartic acid residue (G336D).

[0382] In some embodiments, the adenosine deaminase comprises a mutation at Glycine487 of the hADAR2-D amino acid sequence, or a corresponding position in a homologous ADAR protein. In some embodiments, the glycine residue at position 487 is replaced by a non-polar amino acid residue with relatively small side chains. For example, in some embodiments, the glycine residue at position 487 is replaced by an alanine residue (G487A). In some embodiments, the glycine residue at position 487 is replaced by a valine residue (G487V). In some embodiments, the glycine residue at position 487 is replaced by an amino acid residue with relatively large side chains. In some embodiments, the glycine residue at position 487 is replaced by a arginine residue (G487R). In some embodiments, the glycine residue at position 487 is replaced by a lysine residue (G487K). In some embodiments, the glycine residue at position 487 is replaced by a tryptophan residue (G487W). In some embodiments, the glycine residue at position 487 is replaced by a tyrosine residue (G487Y).

[0383] In some embodiments, the adenosine deaminase comprises a mutation at glutamic acid488 of the hADAR2-D amino acid sequence, or a corresponding position in a homologous ADAR protein. In some embodiments, the glutamic acid residue at position 488 is replaced by a glutamine residue (E488Q). In some embodiments, the glutamic acid residue at position 488 is replaced by a histidine residue (E488H). In some embodiments, the glutamic acid residue at position 488 is replace by an arginine residue (E488R). In some embodiments, the glutamic acid residue at position 488 is replace by a lysine residue (E488K). In some embodiments, the glutamic acid residue at position 488 is replace by an asparagine residue (E488N). In some embodiments, the glutamic acid residue at position 488 is replace by an alanine residue (E488A). In some embodiments, the glutamic acid residue at position 488 is replace by a Methionine residue (E488M). In some embodiments, the glutamic acid residue at position 488 is replace by a serine residue (E488S). In some embodiments, the glutamic acid residue at position 488 is replace by a phenylalanine residue (E488F). In some embodiments, the glutamic acid residue at position 488 is replace by a lysine residue (E488L). In some embodiments, the glutamic acid residue at position 488 is replace by a tryptophan residue (E488W).

[0384] In some embodiments, the adenosine deaminase comprises a mutation at threonine490 of the hADAR2-D amino acid sequence, or a corresponding position in a homologous ADAR protein. In some embodiments, the threonine residue at position 490 is replaced by a cysteine residue (T490C). In some embodiments, the threonine residue at position 490 is replaced by a serine residue (T490S). In some embodiments, the threonine residue at position 490 is replaced by an alanine residue (T490A). In some embodiments, the threonine residue at position 490 is replaced by a phenylalanine residue (T490F). In some embodiments, the threonine residue at position 490 is replaced by a tyrosine residue (T490Y). In some embodiments, the threonine residue at position 490 is replaced by a serine residue (T490R). In some embodiments, the threonine residue at position 490 is replaced by an alanine residue (T490K). In some embodiments, the threonine residue at position 490 is replaced by a phenylalanine residue (T490P). In some embodiments, the threonine residue at position 490 is replaced by a tyrosine residue (T490E).

[0385] In some embodiments, the adenosine deaminase comprises a mutation at valine493 of the hADAR2-D amino acid sequence, or a corresponding position in a homologous ADAR protein. In some embodiments, the valine residue at position 493 is replaced by an alanine residue (V493A). In some embodiments, the valine residue at position 493 is replaced by a serine residue (V493S). In some embodiments, the valine residue at position 493 is replaced by a threonine residue (V493T). In some embodiments, the valine residue at position 493 is replaced by an arginine residue (V493R). In some embodiments, the valine residue at position 493 is replaced by an aspartic acid residue (V493D). In some embodiments, the valine residue at position 493 is replaced by a proline residue (V493P). In some embodiments, the valine residue at position 493 is replaced by a glycine residue (V493G).

[0386] In some embodiments, the adenosine deaminase comprises a mutation at alanine589 of the hADAR2-D amino acid sequence, or a corresponding position in a homologous ADAR protein. In some embodiments, the alanine residue at position 589 is replaced by a valine residue (A589V).

[0387] In some embodiments, the adenosine deaminase comprises a mutation at asparagine597 of the hADAR2-D amino acid sequence, or a corresponding position in a homologous ADAR protein. In some embodiments, the asparagine residue at position 597 is replaced by a lysine residue (N597K). In some embodiments, the adenosine deaminase comprises a mutation at position 597 of the amino acid sequence, which has an asparagine residue in the wild type sequence. In some embodiments, the asparagine residue at position 597 is replaced by an arginine residue (N597R). In some embodiments, the adenosine deaminase comprises a mutation at position 597 of the amino acid sequence, which has an asparagine residue in the wild type sequence. In some embodiments, the asparagine residue at position 597 is replaced by an alanine residue (N597A). In some embodiments, the adenosine deaminase comprises a mutation at position 597 of the amino acid sequence, which has an asparagine residue in the wild type sequence. In some embodiments, the asparagine residue at position 597 is replaced by a glutamic acid residue (N597E). In some embodiments, the adenosine deaminase comprises a mutation at position 597 of the amino acid sequence, which has an asparagine residue in the wild type sequence. In some embodiments, the asparagine residue at position 597 is replaced by a histidine residue (N597H). In some embodiments, the adenosine deaminase comprises a mutation at position 597 of the amino acid sequence, which has an asparagine residue in the wild type sequence. In some embodiments, the asparagine residue at position 597 is replaced by a glycine residue (N597G). In some embodiments, the adenosine deaminase comprises a mutation at position 597 of the amino acid sequence, which has an asparagine residue in the wild type sequence. In some embodiments, the asparagine residue at position 597 is replaced by a tyrosine residue (N597Y). In some embodiments, the asparagine residue at position 597 is replaced by a phenylalanine residue (N597F). In some embodiments, the adenosine deaminase comprises mutation N5971. In some embodiments, the adenosine deaminase comprises mutation N597L. In some embodiments, the adenosine deaminase comprises mutation N597V. In some embodiments, the adenosine deaminase comprises mutation N597M. In some embodiments, the adenosine deaminase comprises mutation N597C. In some embodiments, the adenosine deaminase comprises mutation N597P. In some embodiments, the adenosine deaminase comprises mutation N597T. In some embodiments, the adenosine deaminase comprises mutation N597S. In some embodiments, the adenosine deaminase comprises mutation N597W. In some embodiments, the adenosine deaminase comprises mutation N597Q. In some embodiments, the adenosine deaminase comprises mutation N597D. In certain example embodiments, the mutations at N597 described above are further made in the context of an E488Q background.

[0388] In some embodiments, the adenosine deaminase comprises a mutation at serine599 of the hADAR2-D amino acid sequence, or a corresponding position in a homologous ADAR protein. In some embodiments, the serine residue at position 599 is replaced by a threonine residue (S599T).

[0389] In some embodiments, the adenosine deaminase comprises a mutation at asparagine613 of the hADAR2-D amino acid sequence, or a corresponding position in a homologous ADAR protein. In some embodiments, the asparagine residue at position 613 is replaced by a lysine residue (N613K). In some embodiments, the adenosine deaminase comprises a mutation at position 613 of the amino acid sequence, which has an asparagine residue in the wild type sequence. In some embodiments, the asparagine residue at position 613 is replaced by an arginine residue (N613R). In some embodiments, the adenosine deaminase comprises a mutation at position 613 of the amino acid sequence, which has an asparagine residue in the wild type sequence. In some embodiments, the asparagine residue at position 613 is replaced by an alanine residue (N613A) In some embodiments, the adenosine deaminase comprises a mutation at position 613 of the amino acid sequence, which has an asparagine residue in the wild type sequence. In some embodiments, the asparagine residue at position 613 is replaced by a glutamic acid residue (N613E). In some embodiments, the adenosine deaminase comprises mutation N6131. In some embodiments, the adenosine deaminase comprises mutation N613L. In some embodiments, the adenosine deaminase comprises mutation N613V. In some embodiments, the adenosine deaminase comprises mutation N613F. In some embodiments, the adenosine deaminase comprises mutation N613M. In some embodiments, the adenosine deaminase comprises mutation N613C. In some embodiments, the adenosine deaminase comprises mutation N613G. In some embodiments, the adenosine deaminase comprises mutation N613P. In some embodiments, the adenosine deaminase comprises mutation N613T. In some embodiments, the adenosine deaminase comprises mutation N613S. In some embodiments, the adenosine deaminase comprises mutation N613Y. In some embodiments, the adenosine deaminase comprises mutation N613W. In some embodiments, the adenosine deaminase comprises mutation N613Q. In some embodiments, the adenosine deaminase comprises mutation N613H. In some embodiments, the adenosine deaminase comprises mutation N613D. In some embodiments, the mutations at N613 described above are further made in combination with a E488Q mutation.

[0390] In some embodiments, to improve editing efficiency, the adenosine deaminase may comprise one or more of the mutations: G336D, G487A, G487V, E488Q, E488H, E488R, E488N, E488A, E488S, E488M, T490C, T490S, V493T, V493S, V493A, V493R, V493D, V493P, V493G, N597K, N597R, N597A, N597E, N597H, N597G, N597Y, A589V, S599T, N613K, N613R, N613A, N613E, based on amino acid sequence positions of hADAR2-D, and mutations in a homologous ADAR protein corresponding to the above.

[0391] In some embodiments, to reduce editing efficiency, the adenosine deaminase may comprise one or more of the mutations: E488F, E488L, E488W, T490A, T490F, T490Y, T490R, T490K, T490P, T490E, N597F, based on amino acid sequence positions of hADAR2-D, and mutations in a homologous ADAR protein corresponding to the above. In particular embodiments, it can be of interest to use an adenosine deaminase enzyme with reduced efficacy to reduce off-target effects.

[0392] In some embodiments, to reduce off-target effects, the adenosine deaminase comprises one or more of mutations at R348, V351, T375, K376, E396, C451, R455, N473, R474, K475, R477, R481, 5486, E488, T490, 5495, R510, based on amino acid sequence positions of hADAR2-D, and mutations in a homologous ADAR protein corresponding to the above. In some embodiments, the adenosine deaminase comprises mutation at E488 and one or more additional positions selected from R348, V351, T375, K376, E396, C451, R455, N473, R474, K475, R477, R481, S486, T490, S495, R510. In some embodiments, the adenosine deaminase comprises mutation at T375, and optionally at one or more additional positions. In some embodiments, the adenosine deaminase comprises mutation at N473, and optionally at one or more additional positions. In some embodiments, the adenosine deaminase comprises mutation at V351, and optionally at one or more additional positions. In some embodiments, the adenosine deaminase comprises mutation at E488 and T375, and optionally at one or more additional positions. In some embodiments, the adenosine deaminase comprises mutation at E488 and N473, and optionally at one or more additional positions. In some embodiments, the adenosine deaminase comprises mutation E488 and V351, and optionally at one or more additional positions. In some embodiments, the adenosine deaminase comprises mutation at E488 and one or more of T375, N473, and V351.

[0393] In some embodiments, to reduce off-target effects, the adenosine deaminase comprises one or more of mutations selected from R348E, V351L, T375G, T375S, R455G, R455S, R455E, N473D, R474E, K475Q, R477E, R481E, S486T, E488Q, T490A, T490S, S495T, and R510E, based on amino acid sequence positions of hADAR2-D, and mutations in a homologous ADAR protein corresponding to the above. In some embodiments, the adenosine deaminase comprises mutation E488Q and one or more additional mutations selected from R348E, V351L, T375G, T375S, R455G, R455S, R455E, N473D, R474E, K475Q, R477E, R481E, S486T, T490A, T490S, S495T, and R510E. In some embodiments, the adenosine deaminase comprises mutation T375G or T375S, and optionally one or more additional mutations. In some embodiments, the adenosine deaminase comprises mutation N473D, and optionally one or more additional mutations. In some embodiments, the adenosine deaminase comprises mutation V351L, and optionally one or more additional mutations. In some embodiments, the adenosine deaminase comprises mutation E488Q, and T375G or T375G, and optionally one or more additional mutations. In some embodiments, the adenosine deaminase comprises mutation E488Q and N473D, and optionally one or more additional mutations. In some embodiments, the adenosine deaminase comprises mutation E488Q and V351L, and optionally one or more additional mutations. In some embodiments, the adenosine deaminase comprises mutation E488Q and one or more of T375G/S, N473D and V351L.

[0394] In certain examples, the adenosine deaminase protein or catalytic domain thereof has been modified to comprise a mutation at E488, preferably E488Q, of the hADAR2-D amino acid sequence, or a corresponding position in a homologous ADAR protein and/or wherein the adenosine deaminase protein or catalytic domain thereof has been modified to comprise a mutation at T375, preferably T375G of the hADAR2-D amino acid sequence, or a corresponding position in a homologous ADAR protein. In certain examples, the adenosine deaminase protein or catalytic domain thereof has been modified to comprise a mutation at E1008, preferably E1008Q, of the hADAR1d amino acid sequence, or a corresponding position in a homologous ADAR protein. In certain examples, the adenosine deaminase protein or catalytic domain thereof has been modified to comprise one or more mutation as provided in any of FIGS. 43A-43D, 44, 45, 46A-46B, 47A-47B, or a corresponding mutation in an ADAR homologue or orthologue.

[0395] Crystal structures of the human ADAR2 deaminase domain bound to duplex RNA reveal a protein loop that binds the RNA on the 5′ side of the modification site. This 5′ binding loop is one contributor to substrate specificity differences between ADAR family members. See Wang et al., Nucleic Acids Res., 44(20):9872-9880 (2016), the content of which is incorporated herein by reference in its entirety. In addition, an ADAR2-specific RNA-binding loop was identified near the enzyme active site. See Mathews et al., Nat. Struct. Mol. Biol., 23(5):426-33 (2016), the content of which is incorporated herein by reference in its entirety. In some embodiments, the adenosine deaminase comprises one or more mutations in the RNA binding loop to improve editing specificity and/or efficiency.

[0396] In some embodiments, the adenosine deaminase comprises a mutation at alanine454 of the hADAR2-D amino acid sequence, or a corresponding position in a homologous ADAR protein. In some embodiments, the alanine residue at position 454 is replaced by a serine residue (A454S). In some embodiments, the alanine residue at position 454 is replaced by a cysteine residue (A454C). In some embodiments, the alanine residue at position 454 is replaced by an aspartic acid residue (A454D).

[0397] In some embodiments, the adenosine deaminase comprises a mutation at arginine455 of the hADAR2-D amino acid sequence, or a corresponding position in a homologous ADAR protein. In some embodiments, the arginine residue at position 455 is replaced by an alanine residue (R455A). In some embodiments, the arginine residue at position 455 is replaced by a valine residue (R455V). In some embodiments, the arginine residue at position 455 is replaced by a histidine residue (R455H). In some embodiments, the arginine residue at position 455 is replaced by a glycine residue (R455G). In some embodiments, the arginine residue at position 455 is replaced by a serine residue (R455S). In some embodiments, the arginine residue at position 455 is replaced by a glutamic acid residue (R455E). In some embodiments, the adenosine deaminase comprises mutation R455C. In some embodiments, the adenosine deaminase comprises mutation R4551. In some embodiments, the adenosine deaminase comprises mutation R455K. In some embodiments, the adenosine deaminase comprises mutation R455L. In some embodiments, the adenosine deaminase comprises mutation R455M. In some embodiments, the adenosine deaminase comprises mutation R455N. In some embodiments, the adenosine deaminase comprises mutation R455Q. In some embodiments, the adenosine deaminase comprises mutation R455F. In some embodiments, the adenosine deaminase comprises mutation R455W. In some embodiments, the adenosine deaminase comprises mutation R455P. In some embodiments, the adenosine deaminase comprises mutation R455Y. In some embodiments, the adenosine deaminase comprises mutation R455E. In some embodiments, the adenosine deaminase comprises mutation R455D. In some embodiments, the mutations at at R455 described above are further made in combination with a E488Q mutation.

[0398] In some embodiments, the adenosine deaminase comprises a mutation at isoleucine456 of the hADAR2-D amino acid sequence, or a corresponding position in a homologous ADAR protein. In some embodiments, the isoleucine residue at position 456 is replaced by a valine residue (I456V). In some embodiments, the isoleucine residue at position 456 is replaced by a leucine residue (I456L). In some embodiments, the isoleucine residue at position 456 is replaced by an aspartic acid residue (I456D).

[0399] In some embodiments, the adenosine deaminase comprises a mutation at phenylalanine457 of the hADAR2-D amino acid sequence, or a corresponding position in a homologous ADAR protein. In some embodiments, the phenylalanine residue at position 457 is replaced by a tyrosine residue (F457Y). In some embodiments, the phenylalanine residue at position 457 is replaced by an arginine residue (F457R). In some embodiments, the phenylalanine residue at position 457 is replaced by a glutamic acid residue (F457E).

[0400] In some embodiments, the adenosine deaminase comprises a mutation at serine458 of the hADAR2-D amino acid sequence, or a corresponding position in a homologous ADAR protein. In some embodiments, the serine residue at position 458 is replaced by a valine residue (S458V). In some embodiments, the serine residue at position 458 is replaced by a phenylalanine residue (S458F). In some embodiments, the serine residue at position 458 is replaced by a proline residue (S458P). In some embodiments, the adenosine deaminase comprises mutation S458I. In some embodiments, the adenosine deaminase comprises mutation S458L. In some embodiments, the adenosine deaminase comprises mutation S458M. In some embodiments, the adenosine deaminase comprises mutation S458C. In some embodiments, the adenosine deaminase comprises mutation S458A. In some embodiments, the adenosine deaminase comprises mutation S458G. In some embodiments, the adenosine deaminase comprises mutation S458T. In some embodiments, the adenosine deaminase comprises mutation S458Y. In some embodiments, the adenosine deaminase comprises mutation S458W. In some embodiments, the adenosine deaminase comprises mutation S458Q. In some embodiments, the adenosine deaminase comprises mutation S458N. In some embodiments, the adenosine deaminase comprises mutation S458H. In some embodiments, the adenosine deaminase comprises mutation S458E. In some embodiments, the adenosine deaminase comprises mutation S458D. In some embodiments, the adenosine deaminase comprises mutation S458K. In some embodiments, the adenosine deaminase comprises mutation S458R. In some embodiments, the mutations at 5458 described above are further made in combination with a E488Q mutation.

[0401] In some embodiments, the adenosine deaminase comprises a mutation at proline459 of the hADAR2-D amino acid sequence, or a corresponding position in a homologous ADAR protein. In some embodiments, the proline residue at position 459 is replaced by a cysteine residue (P459C). In some embodiments, the proline residue at position 459 is replaced by a histidine residue (P459H). In some embodiments, the proline residue at position 459 is replaced by a tryptophan residue (P459W).

[0402] In some embodiments, the adenosine deaminase comprises a mutation at histidine460 of the hADAR2-D amino acid sequence, or a corresponding position in a homologous ADAR protein. In some embodiments, the histidine residue at position 460 is replaced by an arginine residue (H460R). In some embodiments, the histidine residue at position 460 is replaced by an isoleucine residue (H460I). In some embodiments, the histidine residue at position 460 is replaced by a proline residue (H460P). In some embodiments, the adenosine deaminase comprises mutation H460L. In some embodiments, the adenosine deaminase comprises mutation H460V. In some embodiments, the adenosine deaminase comprises mutation H460F. In some embodiments, the adenosine deaminase comprises mutation H460M. In some embodiments, the adenosine deaminase comprises mutation H460C. In some embodiments, the adenosine deaminase comprises mutation H460A. In some embodiments, the adenosine deaminase comprises mutation H460G. In some embodiments, the adenosine deaminase comprises mutation H460T. In some embodiments, the adenosine deaminase comprises mutation H460S. In some embodiments, the adenosine deaminase comprises mutation H460Y. In some embodiments, the adenosine deaminase comprises mutation H460W. In some embodiments, the adenosine deaminase comprises mutation H460Q. In some embodiments, the adenosine deaminase comprises mutation H460N. In some embodiments, the adenosine deaminase comprises mutation H460E. In some embodiments, the adenosine deaminase comprises mutation H460D. In some embodiments, the adenosine deaminase comprises mutation H460K. In some embodiments, the mutations at H460 described above are further made in combination with a E488Q mutation.

[0403] In some embodiments, the adenosine deaminase comprises a mutation at proline462 of the hADAR2-D amino acid sequence, or a corresponding position in a homologous ADAR protein. In some embodiments, the proline residue at position 462 is replaced by a serine residue (P462S). In some embodiments, the proline residue at position 462 is replaced by a tryptophan residue (P462W). In some embodiments, the proline residue at position 462 is replaced by a glutamic acid residue (P462E).

[0404] In some embodiments, the adenosine deaminase comprises a mutation at aspartic acid469 of the hADAR2-D amino acid sequence, or a corresponding position in a homologous ADAR protein. In some embodiments, the aspartic acid residue at position 469 is replaced by a glutamine residue (D469Q). In some embodiments, the aspartic acid residue at position 469 is replaced by a serine residue (D469S). In some embodiments, the aspartic acid residue at position 469 is replaced by a tyrosine residue (D469Y).

[0405] In some embodiments, the adenosine deaminase comprises a mutation at arginine470 of the hADAR2-D amino acid sequence, or a corresponding position in a homologous ADAR protein. In some embodiments, the arginine residue at position 470 is replaced by an alanine residue (R470A). In some embodiments, the arginine residue at position 470 is replaced by an isoleucine residue (R4701). In some embodiments, the arginine residue at position 470 is replaced by an aspartic acid residue (R470D).

[0406] In some embodiments, the adenosine deaminase comprises a mutation at histidine471 of the hADAR2-D amino acid sequence, or a corresponding position in a homologous ADAR protein. In some embodiments, the histidine residue at position 471 is replaced by a lysine residue (H471K). In some embodiments, the histidine residue at position 471 is replaced by a threonine residue (H471T). In some embodiments, the histidine residue at position 471 is replaced by a valine residue (H471V).

[0407] In some embodiments, the adenosine deaminase comprises a mutation at proline472 of the hADAR2-D amino acid sequence, or a corresponding position in a homologous ADAR protein. In some embodiments, the proline residue at position 472 is replaced by a lysine residue (P472K). In some embodiments, the proline residue at position 472 is replaced by a threonine residue (P472T). In some embodiments, the proline residue at position 472 is replaced by an aspartic acid residue (P472D).

[0408] In some embodiments, the adenosine deaminase comprises a mutation at asparagine473 of the hADAR2-D amino acid sequence, or a corresponding position in a homologous ADAR protein. In some embodiments, the asparagine residue at position 473 is replaced by an arginine residue (N473R). In some embodiments, the asparagine residue at position 473 is replaced by a tryptophan residue (N473W). In some embodiments, the asparagine residue at position 473 is replaced by a proline residue (N473P). In some embodiments, the asparagine residue at position 473 is replaced by an aspartic acid residue (N473D).

[0409] In some embodiments, the adenosine deaminase comprises a mutation at arginine474 of the hADAR2-D amino acid sequence, or a corresponding position in a homologous ADAR protein. In some embodiments, the arginine residue at position 474 is replaced by a lysine residue (R474K). In some embodiments, the arginine residue at position 474 is replaced by a glycine residue (R474G). In some embodiments, the arginine residue at position 474 is replaced by an aspartic acid residue (R474D). In some embodiments, the arginine residue at position 474 is replaced by a glutamic acid residue (R474E).

[0410] In some embodiments, the adenosine deaminase comprises a mutation at lysine475 of the hADAR2-D amino acid sequence, or a corresponding position in a homologous ADAR protein. In some embodiments, the lysine residue at position 475 is replaced by a glutamine residue (K475Q). In some embodiments, the lysine residue at position 475 is replaced by an asparagine residue (K475N). In some embodiments, the lysine residue at position 475 is replaced by an aspartic acid residue (K475D).

[0411] In some embodiments, the adenosine deaminase comprises a mutation at alanine476 of the hADAR2-D amino acid sequence, or a corresponding position in a homologous ADAR protein. In some embodiments, the alanine residue at position 476 is replaced by a serine residue (A476S). In some embodiments, the alanine residue at position 476 is replaced by an arginine residue (A476R). In some embodiments, the alanine residue at position 476 is replaced by a glutamic acid residue (A476E).

[0412] In some embodiments, the adenosine deaminase comprises a mutation at arginine477 of the hADAR2-D amino acid sequence, or a corresponding position in a homologous ADAR protein. In some embodiments, the arginine residue at position 477 is replaced by a lysine residue (R477K). In some embodiments, the arginine residue at position 477 is replaced by a threonine residue (R477T). In some embodiments, the arginine residue at position 477 is replaced by a phenylalanine residue (R477F). In some embodiments, the arginine residue at position 474 is replaced by a glutamic acid residue (R477E).

[0413] In some embodiments, the adenosine deaminase comprises a mutation at glycine478 of the hADAR2-D amino acid sequence, or a corresponding position in a homologous ADAR protein. In some embodiments, the glycine residue at position 478 is replaced by an alanine residue (G478A). In some embodiments, the glycine residue at position 478 is replaced by an arginine residue (G478R). In some embodiments, the glycine residue at position 478 is replaced by a tyrosine residue (G478Y). In some embodiments, the adenosine deaminase comprises mutation G4781. In some embodiments, the adenosine deaminase comprises mutation G478L. In some embodiments, the adenosine deaminase comprises mutation G478V. In some embodiments, the adenosine deaminase comprises mutation G478F. In some embodiments, the adenosine deaminase comprises mutation G478M. In some embodiments, the adenosine deaminase comprises mutation G478C. In some embodiments, the adenosine deaminase comprises mutation G478P. In some embodiments, the adenosine deaminase comprises mutation G478T. In some embodiments, the adenosine deaminase comprises mutation G478S. In some embodiments, the adenosine deaminase comprises mutation G478W. In some embodiments, the adenosine deaminase comprises mutation G478Q. In some embodiments, the adenosine deaminase comprises mutation G478N. In some embodiments, the adenosine deaminase comprises mutation G478H. In some embodiments, the adenosine deaminase comprises mutation G478E. In some embodiments, the adenosine deaminase comprises mutation G478D. In some embodiments, the adenosine deaminase comprises mutation G478K. In some embodiments, the mutations at G478 described above are further made in combination with a E488Q mutation.

[0414] In some embodiments, the adenosine deaminase comprises a mutation at glutamine479 of the hADAR2-D amino acid sequence, or a corresponding position in a homologous ADAR protein. In some embodiments, the glutamine residue at position 479 is replaced by an asparagine residue (Q479N). In some embodiments, the glutamine residue at position 479 is replaced by a serine residue (Q479S). In some embodiments, the glutamine residue at position 479 is replaced by a proline residue (Q479P).

[0415] In some embodiments, the adenosine deaminase comprises a mutation at arginine348 of the hADAR2-D amino acid sequence, or a corresponding position in a homologous ADAR protein. In some embodiments, the arginine residue at position 348 is replaced by an alanine residue (R348A). In some embodiments, the arginine residue at position 348 is replaced by a glutamic acid residue (R348E).

[0416] In some embodiments, the adenosine deaminase comprises a mutation at valine351 of the hADAR2-D amino acid sequence, or a corresponding position in a homologous ADAR protein. In some embodiments, the valine residue at position 351 is replaced by a leucine residue (V351L). In some embodiments, the adenosine deaminase comprises mutation V351Y. In some embodiments, the adenosine deaminase comprises mutation V351M. In some embodiments, the adenosine deaminase comprises mutation V351T. In some embodiments, the adenosine deaminase comprises mutation V351G. In some embodiments, the adenosine deaminase comprises mutation V351A. In some embodiments, the adenosine deaminase comprises mutation V351F. In some embodiments, the adenosine deaminase comprises mutation V351E. In some embodiments, the adenosine deaminase comprises mutation V3511. In some embodiments, the adenosine deaminase comprises mutation V351C. In some embodiments, the adenosine deaminase comprises mutation V351H. In some embodiments, the adenosine deaminase comprises mutation V351P. In some embodiments, the adenosine deaminase comprises mutation V351S. In some embodiments, the adenosine deaminase comprises mutation V351K. In some embodiments, the adenosine deaminase comprises mutation V351N. In some embodiments, the adenosine deaminase comprises mutation V351W. In some embodiments, the adenosine deaminase comprises mutation V351Q. In some embodiments, the adenosine deaminase comprises mutation V351D. In some embodiments, the adenosine deaminase comprises mutation V351R. In some embodiments, the mutations at V351 described above are further made in combination with a E488Q mutation.

[0417] In some embodiments, the adenosine deaminase comprises a mutation at threonine375 of the hADAR2-D amino acid sequence, or a corresponding position in a homologous ADAR protein. In some embodiments, the threonine residue at position 375 is replaced by a glycine residue (T375G). In some embodiments, the threonine residue at position 375 is replaced by a serine residue (T375S). In some embodiments, the adenosine deaminase comprises mutation T375H. In some embodiments, the adenosine deaminase comprises mutation T375Q. In some embodiments, the adenosine deaminase comprises mutation T375C. In some embodiments, the adenosine deaminase comprises mutation T375N. In some embodiments, the adenosine deaminase comprises mutation T375M. In some embodiments, the adenosine deaminase comprises mutation T375A. In some embodiments, the adenosine deaminase comprises mutation T375W. In some embodiments, the adenosine deaminase comprises mutation T375V. In some embodiments, the adenosine deaminase comprises mutation T375R. In some embodiments, the adenosine deaminase comprises mutation T375E. In some embodiments, the adenosine deaminase comprises mutation T375K. In some embodiments, the adenosine deaminase comprises mutation T375F. In some embodiments, the adenosine deaminase comprises mutation T3751. In some embodiments, the adenosine deaminase comprises mutation T375D. In some embodiments, the adenosine deaminase comprises mutation T375P. In some embodiments, the adenosine deaminase comprises mutation T375L. In some embodiments, the adenosine deaminase comprises mutation T375Y. In some embodiments, the mutations at T375Y described above are further made in combination with an E488Q mutation.

[0418] In some embodiments, the adenosine deaminase comprises a mutation at arginine481 of the hADAR2-D amino acid sequence, or a corresponding position in a homologous ADAR protein. In some embodiments, the arginine residue at position 481 is replaced by a glutamic acid residue (R481E).

[0419] In some embodiments, the adenosine deaminase comprises a mutation at serine486 of the hADAR2-D amino acid sequence, or a corresponding position in a homologous ADAR protein. In some embodiments, the serine residue at position 486 is replaced by a threonine residue (S486T).

[0420] In some embodiments, the adenosine deaminase comprises a mutation at threonine490 of the hADAR2-D amino acid sequence, or a corresponding position in a homologous ADAR protein. In some embodiments, the threonine residue at position 490 is replaced by an alanine residue (T490A). In some embodiments, the threonine residue at position 490 is replaced by a serine residue (T490S).

[0421] In some embodiments, the adenosine deaminase comprises a mutation at serine495 of the hADAR2-D amino acid sequence, or a corresponding position in a homologous ADAR protein. In some embodiments, the serine residue at position 495 is replaced by a threonine residue (S495T).

[0422] In some embodiments, the adenosine deaminase comprises a mutation at arginine510 of the hADAR2-D amino acid sequence, or a corresponding position in a homologous ADAR protein. In some embodiments, the arginine residue at position 510 is replaced by a glutamine residue (R510Q). In some embodiments, the arginine residue at position 510 is replaced by an alanine residue (R510A). In some embodiments, the arginine residue at position 510 is replaced by a glutamic acid residue (R510E).

[0423] In some embodiments, the adenosine deaminase comprises a mutation at glycine593 of the hADAR2-D amino acid sequence, or a corresponding position in a homologous ADAR protein. In some embodiments, the glycine residue at position 593 is replaced by an alanine residue (G593A). In some embodiments, the glycine residue at position 593 is replaced by a glutamic acid residue (G593E).

[0424] In some embodiments, the adenosine deaminase comprises a mutation at lysine594 of the hADAR2-D amino acid sequence, or a corresponding position in a homologous ADAR protein. In some embodiments, the lysine residue at position 594 is replaced by an alanine residue (K594A).

[0425] In some embodiments, the adenosine deaminase comprises a mutation at any one or more of positions A454, R455, 1456, F457, 5458, P459, H460, P462, D469, R470, H471, P472, N473, R474, K475, A476, R477, G478, Q479, R348, R510, G593, K594 of the hADAR2-D amino acid sequence, or a corresponding position in a homologous ADAR protein.

[0426] In some embodiments, the adenosine deaminase comprises any one or more of mutations A454S, A454C, A454D, R455A, R455V, R455H, I456V, I456L, I456D, F457Y, F457R, F457E, S458V, S458F, S458P, P459C, P459H, P459W, H460R, H460I, H460P, P462S, P462W, P462E, D469Q, D469S, D469Y, R470A, R4701, R470D, H471K, H471T, H471V, P472K, P472T, P472D, N473R, N473W, N473P, R474K, R474G, R474D, K475Q, K475N, K475D, A476S, A476R, A476E, R477K, R477T, R477F, G478A, G478R, G478Y, Q479N, Q479S, Q479P, R348A, R510Q, R510A, G593A, G593E, K594A of the hADAR2-D amino acid sequence, or a corresponding position in a homologous ADAR protein.

[0427] In certain embodiments the adenosine deaminase is mutated to convert the activity to cytidine deaminase. Accordingly in some embodiments, the adenosine deaminase comprises one or more mutations in positions selected from E396, C451, V351, R455, T375, K376? 5486, Q488, R510, K594, R348, G593, 5397, H443, L444, Y445, F442, E438, T448, A353, V355, T339, P539, T339, P539, V525 1520, P462 and N579. In particular embodiments, the adenosine deaminase comprises one or more mutations in a position selected from V351, L444, V355, V525 and 1520. In some embodiments, the adenosine deaminase may comprises one or more of mutations at E488, V351, S486, T375, 5370, P462, N597, based on amino acid sequence positions of hADAR2-D, and mutations in a homologous ADAR protein corresponding to the above.

[0428] In some embodiments, the adenosine deaminase may comprise one or more of the mutations: E488Q based on amino acid sequence positions of hADAR2-D, and mutations in a homologous ADAR protein corresponding to the above. In some embodiments, the adenosine deaminase may comprise one or more of the mutations: E488Q, V351G, based on amino acid sequence positions of hADAR2-D, and mutations in a homologous ADAR protein corresponding to the above. In some embodiments, the adenosine deaminase may comprise one or more of the mutations: E488Q, V351G, S486A, based on amino acid sequence positions of hADAR2-D, and mutations in a homologous ADAR protein corresponding to the above. In some embodiments, the adenosine deaminase may comprise one or more of the mutations: E488Q, V351G, S486A, T375S, based on amino acid sequence positions of hADAR2-D, and mutations in a homologous ADAR protein corresponding to the above. In some embodiments, the adenosine deaminase may comprise one or more of the mutations: E488Q, V351G, S486A, T375S, S370C, based on amino acid sequence positions of hADAR2-D, and mutations in a homologous ADAR protein corresponding to the above. In some embodiments, the adenosine deaminase may comprise one or more of the mutations: E488Q, V351G, S486A, T375S, S370C, P462A, based on amino acid sequence positions of hADAR2-D, and mutations in a homologous ADAR protein corresponding to the above. In some embodiments, the adenosine deaminase may comprise one or more of the mutations: E488Q, V351G, S486A, T375S, S370C, P462A, N5971, based on amino acid sequence positions of hADAR2-D, and mutations in a homologous ADAR protein corresponding to the above. In some embodiments, the adenosine deaminase may comprise one or more of the mutations: E488Q, V351G, S486A, T375S, S370C, P462A, N5971, L3321, based on amino acid sequence positions of hADAR2-D, and mutations in a homologous ADAR protein corresponding to the above. In some embodiments, the adenosine deaminase may comprise one or more of the mutations: E488Q, V351G, S486A, T375S, S370C, P462A, N5971, L3321, I398V, based on amino acid sequence positions of hADAR2-D, and mutations in a homologous ADAR protein corresponding to the above. In some embodiments, the adenosine deaminase may comprise one or more of the mutations: E488Q, V351G, S486A, T375S, S370C, P462A, N5971, L3321, I398V, K3501, based on amino acid sequence positions of hADAR2-D, and mutations in a homologous ADAR protein corresponding to the above.

[0429] In some embodiments, the adenosine deaminase comprises a mutation at any one or more of positions T375, V351, G478, 5458, H460 of the hADAR2-D amino acid sequence, or a corresponding position in a homologous ADAR protein, optionally in combination a mutation at E488. In some embodiments, the adenosine deaminase comprises one or more of mutations selected from T375G, T375C, T375H, T375Q, V351M, V351T, V351Y, G478R, S458F, H460I, optionally in combination with E488Q.

[0430] In some embodiments, the adenosine deaminase comprises one or more of mutations selected from T375H, T375Q, V351M, V351Y, H460P, optionally in combination with E488Q.

[0431] In some embodiments, the adenosine deaminase comprises mutations T375S and S458F, optionally in combination with E488Q.

[0432] In some embodiments, the adenosine deaminase comprises a mutation at two or more of positions T375, N473, R474, G478, S458, P459, V351, R455, R455, T490, R348, Q479 of the hADAR2-D amino acid sequence, or a corresponding position in a homologous ADAR protein, optionally in combination a mutation at E488. In some embodiments, the adenosine deaminase comprises two or more of mutations selected from T375G, T375S, N473D, R474E, G478R, S458F, P459W, V351L, R455G, R455S, T490A, R348E, Q479P, optionally in combination with E488Q.

[0433] In some embodiments, the adenosine deaminase comprises mutations T375G and V351L. In some embodiments, the adenosine deaminase comprises mutations T375G and R455G. In some embodiments, the adenosine deaminase comprises mutations T375G and R455S. In some embodiments, the adenosine deaminase comprises mutations T375G and T490A. In some embodiments, the adenosine deaminase comprises mutations T375G and R348E. In some embodiments, the adenosine deaminase comprises mutations T375S and V351L. In some embodiments, the adenosine deaminase comprises mutations T375S and R455G. In some embodiments, the adenosine deaminase comprises mutations T375S and R455S. In some embodiments, the adenosine deaminase comprises mutations T375S and T490A. In some embodiments, the adenosine deaminase comprises mutations T375S and R348E. In some embodiments, the adenosine deaminase comprises mutations N473D and V351L. In some embodiments, the adenosine deaminase comprises mutations N473D and R455G. In some embodiments, the adenosine deaminase comprises mutations N473D and R455S. In some embodiments, the adenosine deaminase comprises mutations N473D and T490A. In some embodiments, the adenosine deaminase comprises mutations N473D and R348E. In some embodiments, the adenosine deaminase comprises mutations R474E and V351L. In some embodiments, the adenosine deaminase comprises mutations R474E and R455G. In some embodiments, the adenosine deaminase comprises mutations R474E and R455S. In some embodiments, the adenosine deaminase comprises mutations R474E and T490A. In some embodiments, the adenosine deaminase comprises mutations R474E and R348E. In some embodiments, the adenosine deaminase comprises mutations S458F and T375G. In some embodiments, the adenosine deaminase comprises mutations S458F and T375S. In some embodiments, the adenosine deaminase comprises mutations S458F and N473D. In some embodiments, the adenosine deaminase comprises mutations S458F and R474E. In some embodiments, the adenosine deaminase comprises mutations S458F and G478R. In some embodiments, the adenosine deaminase comprises mutations G478R and T375G. In some embodiments, the adenosine deaminase comprises mutations G478R and T375S. In some embodiments, the adenosine deaminase comprises mutations G478R and N473D. In some embodiments, the adenosine deaminase comprises mutations G478R and R474E. In some embodiments, the adenosine deaminase comprises mutations P459W and T375G. In some embodiments, the adenosine deaminase comprises mutations P459W and T375S. In some embodiments, the adenosine deaminase comprises mutations P459W and N473D. In some embodiments, the adenosine deaminase comprises mutations P459W and R474E. In some embodiments, the adenosine deaminase comprises mutations P459W and G478R. In some embodiments, the adenosine deaminase comprises mutations P459W and S458F. In some embodiments, the adenosine deaminase comprises mutations Q479P and T375G. In some embodiments, the adenosine deaminase comprises mutations Q479P and T375S. In some embodiments, the adenosine deaminase comprises mutations Q479P and N473D. In some embodiments, the adenosine deaminase comprises mutations Q479P and R474E. In some embodiments, the adenosine deaminase comprises mutations Q479P and G478R. In some embodiments, the adenosine deaminase comprises mutations Q479P and S458F. In some embodiments, the adenosine deaminase comprises mutations Q479P and P459W. All mutations described in this paragraph may also further be made in combination with a E488Q mutations.

[0434] In some embodiments, the adenosine deaminase comprises a mutation at any one or more of positions K475, Q479, P459, G478, S458 of the hADAR2-D amino acid sequence, or a corresponding position in a homologous ADAR protein, optionally in combination a mutation at E488. In some embodiments, the adenosine deaminase comprises one or more of mutations selected from K475N, Q479N, P459W, G478R, S458P, S458F, optionally in combination with E488Q.

[0435] In some embodiments, the adenosine deaminase comprises a mutation at any one or more of positions T375, V351, R455, H460, A476 of the hADAR2-D amino acid sequence, or a corresponding position in a homologous ADAR protein, optionally in combination a mutation at E488. In some embodiments, the adenosine deaminase comprises one or more of mutations selected from T375G, T375C, T375H, T375Q, V351M, V351T, V351Y, R455H, H460P, H460I, A476E, optionally in combination with E488Q.

[0436] In certain embodiments, improvement of editing and reduction of off-target modification is achieved by chemical modification of gRNAs. gRNAs which are chemically modified as exemplified in Vogel et al. (2014), Angew Chem Int Ed, 53:6267-6271, doi:10.1002/anie.201402634 (incorporated herein by reference in its entirety) reduce off-target activity and improve on-target efficiency. 2′-O-methyl and phosphothioate modified guide RNAs in general improve editing efficiency in cells.

[0437] ADAR has been known to demonstrate a preference for neighboring nucleotides on either side of the edited A (www.nature.com/nsmb/journal/v23/n5/full/nsmb.3203.html, Matthews et al. (2017), Nature Structural Mol Biol, 23(5): 426-433, incorporated herein by reference in its entirety). Accordingly, in certain embodiments, the gRNA, target, and/or ADAR is selected optimized for motif preference.

[0438] Intentional mismatches have been demonstrated in vitro to allow for editing of non-preferred motifs (https://academic.oup.com/nar/article-lookup/doi/10.1093/nar/gku272; Schneider et al (2014), Nucleic Acid Res, 42(10):e87); Fukuda et al. (2017), Scienticic Reports, 7, doi:10.1038/srep41478, incorporated herein by reference in its entirety). Accordingly, in certain embodiments, to enhance RNA editing efficiency on non-preferred 5′ or 3′ neighboring bases, intentional mismatches in neighboring bases are introduced.

[0439] Results suggest that As opposite Cs in the targeting window of the ADAR deaminase domain are preferentially edited over other bases. Additionally, As base-paired with Us within a few bases of the targeted base show low levels of editing by Cas13b-ADAR fusions, suggesting that there is flexibility for the enzyme to edit multiple A's. See e.g. FIG. 18. These two observations suggest that multiple As in the activity window of Cas13b-ADAR fusions could be specified for editing by mismatching all As to be edited with Cs. Accordingly, in certain embodiments, multiple A:C mismatches in the activity window are designed to create multiple A:I edits. In certain embodiments, to suppress potential off-target editing in the activity window, non-target As are paired with As or Gs.

[0440] The terms “editing specificity” and “editing preference” are used interchangeably herein to refer to the extent of A-to-I editing at a particular adenosine site in a double-stranded substrate. In some embodiment, the substrate editing preference is determined by the 5′ nearest neighbor and/or the 3′ nearest neighbor of the target adenosine residue. In some embodiments, the adenosine deaminase has preference for the 5′ nearest neighbor of the substrate ranked as U>A>C>G (“>” indicates greater preference). In some embodiments, the adenosine deaminase has preference for the 3′ nearest neighbor of the substrate ranked as G>C˜A>U (“>” indicates greater preference; “˜” indicates similar preference). In some embodiments, the adenosine deaminase has preference for the 3′ nearest neighbor of the substrate ranked as G>C>U˜A (“>” indicates greater preference; “˜” indicates similar preference). In some embodiments, the adenosine deaminase has preference for the 3′ nearest neighbor of the substrate ranked as G>C>A>U (“>” indicates greater preference). In some embodiments, the adenosine deaminase has preference for the 3′ nearest neighbor of the substrate ranked as C-G-A>U (“>” indicates greater preference; “˜” indicates similar preference). In some embodiments, the adenosine deaminase has preference for a triplet sequence containing the target adenosine residue ranked as TAG>AAG>CAC>AAT>GAA>GAC (“>” indicates greater preference), the center A being the target adenosine residue.

[0441] In some embodiments, the substrate editing preference of an adenosine deaminase is affected by the presence or absence of a nucleic acid binding domain in the adenosine deaminase protein. In some embodiments, to modify substrate editing preference, the deaminase domain is connected with a double-strand RNA binding domain (dsRBD) or a double-strand RNA binding motif (dsRBM). In some embodiments, the dsRBD or dsRBM may be derived from an ADAR protein, such as hADAR1 or hADAR2. In some embodiments, a full length ADAR protein that comprises at least one dsRBD and a deaminase domain is used. In some embodiments, the one or more dsRBM or dsRBD is at the N-terminus of the deaminase domain. In other embodiments, the one or more dsRBM or dsRBD is at the C-terminus of the deaminase domain.

[0442] In some embodiments, the substrate editing preference of an adenosine deaminase is affected by amino acid residues near or in the active center of the enzyme. In some embodiments, to modify substrate editing preference, the adenosine deaminase may comprise one or more of the mutations: G336D, G487R, G487K, G487W, G487Y, E488Q, E488N, T490A, V493A, V493T, V493S, N597K, N597R, A589V, S599T, N613K, N613R, based on amino acid sequence positions of hADAR2-D, and mutations in a homologous ADAR protein corresponding to the above.

[0443] Particularly, in some embodiments, to reduce editing specificity, the adenosine deaminase can comprise one or more of mutations E488Q, V493A, N597K, N613K, based on amino acid sequence positions of hADAR2-D, and mutations in a homologous ADAR protein corresponding to the above. In some embodiments, to increase editing specificity, the adenosine deaminase can comprise mutation T490A.

[0444] In some embodiments, to increase editing preference for target adenosine (A) with an immediate 5′ G, such as substrates comprising the triplet sequence GAC, the center A being the target adenosine residue, the adenosine deaminase can comprise one or more of mutations G336D, E488Q, E488N, V493T, V493S, V493A, A589V, N597K, N597R, S599T, N613K, N613R, based on amino acid sequence positions of hADAR2-D, and mutations in a homologous ADAR protein corresponding to the above.

[0445] Particularly, in some embodiments, the adenosine deaminase comprises mutation E488Q or a corresponding mutation in a homologous ADAR protein for editing substrates comprising the following triplet sequences: GAC, GAA, GAU, GAG, CAU, AAU, UAC, the center A being the target adenosine residue.

[0446] In some embodiments, the adenosine deaminase comprises the wild-type amino acid sequence of hADAR1-D as defined in SEQ ID No. 761. In some embodiments, the adenosine deaminase comprises one or more mutations in the hADAR1-D sequence, such that the editing efficiency, and/or substrate editing preference of hADAR1-D is changed according to specific needs.

[0447] In some embodiments, the adenosine deaminase comprises a mutation at Glycine1007 of the hADAR1-D amino acid sequence, or a corresponding position in a homologous ADAR protein. In some embodiments, the glycine residue at position 1007 is replaced by a non-polar amino acid residue with relatively small side chains. For example, in some embodiments, the glycine residue at position 1007 is replaced by an alanine residue (G1007A). In some embodiments, the glycine residue at position 1007 is replaced by a valine residue (G1007V). In some embodiments, the glycine residue at position 1007 is replaced by an amino acid residue with relatively large side chains. In some embodiments, the glycine residue at position 1007 is replaced by an arginine residue (G1007R). In some embodiments, the glycine residue at position 1007 is replaced by a lysine residue (G1007K). In some embodiments, the glycine residue at position 1007 is replaced by a tryptophan residue (G1007W). In some embodiments, the glycine residue at position 1007 is replaced by a tyrosine residue (G1007Y). Additionally, in other embodiments, the glycine residue at position 1007 is replaced by a leucine residue (G1007L). In other embodiments, the glycine residue at position 1007 is replaced by a threonine residue (G1007T). In other embodiments, the glycine residue at position 1007 is replaced by a serine residue (G1007S).

[0448] In some embodiments, the adenosine deaminase comprises a mutation at glutamic acid1008 of the hADAR1-D amino acid sequence, or a corresponding position in a homologous ADAR protein. In some embodiments, the glutamic acid residue at position 1008 is replaced by a polar amino acid residue having a relatively large side chain. In some embodiments, the glutamic acid residue at position 1008 is replaced by a glutamine residue (E1008Q). In some embodiments, the glutamic acid residue at position 1008 is replaced by a histidine residue (E1008H). In some embodiments, the glutamic acid residue at position 1008 is replaced by an arginine residue (E1008R). In some embodiments, the glutamic acid residue at position 1008 is replaced by a lysine residue (E1008K). In some embodiments, the glutamic acid residue at position 1008 is replaced by a nonpolar or small polar amino acid residue. In some embodiments, the glutamic acid residue at position 1008 is replaced by a phenylalanine residue (E1008F). In some embodiments, the glutamic acid residue at position 1008 is replaced by a tryptophan residue (E1008W). In some embodiments, the glutamic acid residue at position 1008 is replaced by a glycine residue (E1008G). In some embodiments, the glutamic acid residue at position 1008 is replaced by an isoleucine residue (E1008I). In some embodiments, the glutamic acid residue at position 1008 is replaced by a valine residue (E1008V). In some embodiments, the glutamic acid residue at position 1008 is replaced by a proline residue (E1008P). In some embodiments, the glutamic acid residue at position 1008 is replaced by a serine residue (E1008S). In other embodiments, the glutamic acid residue at position 1008 is replaced by an asparagine residue (E1008N). In other embodiments, the glutamic acid residue at position 1008 is replaced by an alanine residue (E1008A). In other embodiments, the glutamic acid residue at position 1008 is replaced by a Methionine residue (E1008M). In some embodiments, the glutamic acid residue at position 1008 is replaced by a leucine residue (E1008L).

[0449] In some embodiments, to improve editing efficiency, the adenosine deaminase may comprise one or more of the mutations: E1007S, E1007A, E1007V, E1008Q, E1008R, E1008H, E1008M, E1008N, E1008K, based on amino acid sequence positions of hADAR1-D, and mutations in a homologous ADAR protein corresponding to the above.

[0450] In some embodiments, to reduce editing efficiency, the adenosine deaminase may comprise one or more of the mutations: E1007R, E1007K, E1007Y, E1007L, E1007T, E1008G, E1008I, E1008P, E1008V, E1008F, E1008W, E1008S, E1008N, E1008K, based on amino acid sequence positions of hADAR1-D, and mutations in a homologous ADAR protein corresponding to the above.

[0451] In some embodiments, the substrate editing preference, efficiency and/or selectivity of an adenosine deaminase is affected by amino acid residues near or in the active center of the enzyme. In some embodiments, the adenosine deaminase comprises a mutation at the glutamic acid 1008 position in hADAR1-D sequence, or a corresponding position in a homologous ADAR protein. In some embodiments, the mutation is E1008R, or a corresponding mutation in a homologous ADAR protein. In some embodiments, the E1008R mutant has an increased editing efficiency for target adenosine residue that has a mismatched G residue on the opposite strand.

[0452] In some embodiments, the adenosine deaminase protein further comprises or is connected to one or more double-stranded RNA (dsRNA) binding motifs (dsRBMs) or domains (dsRBDs) for recognizing and binding to double-stranded nucleic acid substrates. In some embodiments, the interaction between the adenosine deaminase and the double-stranded substrate is mediated by one or more additional protein factor(s), including a CRISPR/CAS protein factor. In some embodiments, the interaction between the adenosine deaminase and the double-stranded substrate is further mediated by one or more nucleic acid component(s), including a guide RNA.

[0453] In certain example embodiments, directed evolution may be used to design modified ADAR proteins capable of catalyzing additional reactions besides deamination of a adenine to a hypoxanthine.

### Modified Adenosine Deaminase Having C-to U Deamination Activity

[0454] In certain example embodiments, directed evolution may be used to design modified ADAR proteins capable of catalyzing additional reactions besides deamination of an adenine to a hypoxanthine. For example, the modified ADAR protein may be capable of catalyzing deamination of a cytidine to a uracil. While not bound by a particular theory, mutations that improve C to U activity may alter the shape of the binding pocket to be more amenable to the smaller cytidine base.

[0455] In some embodiments, the modified adenosine deaminase having C-to-U deamination activity comprises a mutation at any one or more of positions V351, T375, R455, and E488 of the hADAR2-D amino acid sequence, or a corresponding position in a homologous ADAR protein. In some embodiments, the adenosine deaminase comprises mutation E488Q. In some embodiments, the adenosine deaminase comprises one or more of mutations selected from V3511, V351L, V351F, V351M, V351C, V351A, V351G, V351P, V351T, V351S, V351Y, V351W, V351Q, V351N, V351H, V351E, V351D, V351K, V351R, T3751, T375L, T375V, T375F, T375M, T375C, T375A, T375G, T375P, T375S, T375Y, T375W, T375Q, T375N, T375H, T375E, T375D, T375K, T375R, R4551, R455L, R455V, R455F, R455M, R455C, R455A, R455G, R455P, R455T, R455S, R455Y, R455W, R455Q, R455N, R455H, R455E, R455D, R455K. In some embodiments, the adenosine deaminase comprises mutation E488Q, and further comprises one or more of mutations selected from V3511, V351L, V351F, V351M, V351C, V351A, V351G, V351P, V351T, V351S, V351Y, V351W, V351Q, V351N, V351H, V351E, V351D, V351K, V351R, T3751, T375L, T375V, T375F, T375M, T375C, T375A, T375G, T375P, T375S, T375Y, T375W, T375Q, T375N, T375H, T375E, T375D, T375K, T375R, R4551, R455L, R455V, R455F, R455M, R455C, R455A, R455G, R455P, R455T, R455S, R455Y, R455W, R455Q, R455N, R455H, R455E, R455D, R455K.

[0456] In connection with the aforementioned modified ADAR protein having C-to-U deamination activity, the invention described herein also relates to a method for deaminating a C in a target RNA sequence of interest, comprising delivering to a target RNA or DNA an AD-functionalized composition disclosed herein.

[0457] In certain example embodiments, the method for deaminating a C in a target RNA sequence comprising delivering to said target RNA: (a) a catalytically inactive (dead) Cas; (b) a guide molecule which comprises a guide sequence linked to a direct repeat sequence; and (c) a modified ADAR protein having C-to-U deamination activity or catalytic domain thereof; wherein said modified ADAR protein or catalytic domain thereof is covalently or non-covalently linked to said dead Cas protein or said guide molecule or is adapted to link thereto after delivery; wherein guide molecule forms a complex with said dead Cas protein and directs said complex to bind said target RNA sequence of interest; wherein said guide sequence is capable of hybridizing with a target sequence comprising said C to form an RNA duplex; wherein, optionally, said guide sequence comprises a non-pairing A or U at a position corresponding to said C resulting in a mismatch in the RNA duplex formed; and wherein said modified ADAR protein or catalytic domain thereof deaminates said C in said RNA duplex.

[0458] In connection with the aforementioned modified ADAR protein having C-to-U deamination activity, the invention described herein further relates to an engineered, non-naturally occurring system suitable for deaminating a C in a target locus of interest, comprising: (a) a guide molecule which comprises a guide sequence linked to a direct repeat sequence, or a nucleotide sequence encoding said guide molecule; (b) a catalytically inactive Cas13 protein, or a nucleotide sequence encoding said catalytically inactive Cas13 protein; (c) a modified ADAR protein having C-to-U deamination activity or catalytic domain thereof, or a nucleotide sequence encoding said modified ADAR protein or catalytic domain thereof; wherein said modified ADAR protein or catalytic domain thereof is covalently or non-covalently linked to said Cas13 protein or said guide molecule or is adapted to link thereto after delivery; wherein said guide sequence is capable of hybridizing with a target RNA sequence comprising a C to form an RNA duplex; wherein, optionally, said guide sequence comprises a non-pairing A or U at a position corresponding to said C resulting in a mismatch in the RNA duplex formed; wherein, optionally, the system is a vector system comprising one or more vectors comprising: (a) a first regulatory element operably linked to a nucleotide sequence encoding said guide molecule which comprises said guide sequence, (b) a second regulatory element operably linked to a nucleotide sequence encoding said catalytically inactive Cas13 protein; and (c) a nucleotide sequence encoding a modified ADAR protein having C-to-U deamination activity or catalytic domain thereof which is under control of said first or second regulatory element or operably linked to a third regulatory element; wherein, if said nucleotide sequence encoding a modified ADAR protein or catalytic domain thereof is operably linked to a third regulatory element, said modified ADAR protein or catalytic domain thereof is adapted to link to said guide molecule or said Cas13 protein after expression; wherein components (a), (b) and (c) are located on the same or different vectors of the system, optionally wherein said first, second, and/or third regulatory element is an inducible promoter.

[0459] According to the present invention, the substrate of the adenosine deaminase is an RNA/DNAn RNA duplex formed upon binding of the guide molecule to its DNA target which then forms the CRISPR-Cas complex with the CRISPR-Cas enzyme. The RNA/DNA or DNA/RNAn RNA duplex is also referred to herein as the “RNA/DNA hybrid”, “DNA/RNA hybrid” or “double-stranded substrate”. The particular features of the guide molecule and CRISPR-Cas enzyme are detailed below.

[0460] The term “editing selectivity” as used herein refers to the fraction of all sites on a double-stranded substrate that is edited by an adenosine deaminase. Without being bound by theory, it is contemplated that editing selectivity of an adenosine deaminase is affected by the double-stranded substrate's length and secondary structures, such as the presence of mismatched bases, bulges and/or internal loops.

[0461] In some embodiments, when the substrate is a perfectly base-paired duplex longer than 50 bp, the adenosine deaminase may be able to deaminate multiple adenosine residues within the duplex (e.g., 50% of all adenosine residues). In some embodiments, when the substrate is shorter than 50 bp, the editing selectivity of an adenosine deaminase is affected by the presence of a mismatch at the target adenosine site. Particularly, in some embodiments, adenosine (A) residue having a mismatched cytidine (C) residue on the opposite strand is deaminated with high efficiency. In some embodiments, adenosine (A) residue having a mismatched guanosine (G) residue on the opposite strand is skipped without editing.

### Cytidine Deaminase

[0462] The term “cytidine deaminase” or “cytidine deaminase protein” as used herein refers to a protein, a polypeptide, or one or more functional domain(s) of a protein or a polypeptide that is capable of catalyzing a hydrolytic deamination reaction that converts an cytosine (or an cytosine moiety of a molecule) to an uracil (or a uracil moiety of a molecule), as shown below. In some embodiments, the cytosine-containing molecule is an cytidine (C), and the uracil-containing molecule is an uridine (U). The cytosine-containing molecule can be deoxyribonucleic acid (DNA) or ribonucleic acid (RNA).

[chemical structure]

[0463] According to the present disclosure, cytidine deaminases that can be used in connection with the present disclosure include, but are not limited to, members of the enzyme family known as apolipoprotein B mRNA-editing complex (APOBEC) family deaminase, an activation-induced deaminase (AID), or a cytidine deaminase 1 (CDA1). In particular embodiments, the deaminase in an APOBEC1 deaminase, an APOBEC2 deaminase, an APOBEC3A deaminase, an APOBEC3B deaminase, an APOBEC3C deaminase, and APOBEC3D deaminase, an APOBEC3E deaminase, an APOBEC3F deaminase an APOBEC3G deaminase, an APOBEC3H deaminase, or an APOBEC4 deaminase.

[0464] In the methods and systems of the present invention, the cytidine deaminase is capable of targeting Cytosine in a DNA single strand. In certain example embodiments the cytodine deaminase may edit on a single strand present outside of the binding component e.g. bound Cas13. In other example embodiments, the cytodine deaminase may edit at a localized bubble, such as a localized bubble formed by a mismatch at the target edit site but the guide sequence. In certain example embodiments the cytodine deaminase may contain mutations that help focus the are of activity such as those disclosed in Kim et al., Nature Biotechnology (2017) 35(4):371-377 (doi:10.1038/nbt.3803.

[0465] In some embodiments, the cytidine deaminase is derived from one or more metazoa species, including but not limited to, mammals, birds, frogs, squids, fish, flies and worms. In some embodiments, the cytidine deaminase is a human, primate, cow, dog rat or mouse cytidine deaminase.

[0466] In some embodiments, the cytidine deaminase is a human APOBEC, including hAPOBEC1 or hAPOBEC3. In some embodiments, the cytidine deaminase is a human AID.

[0467] In some embodiments, the cytidine deaminase protein recognizes and converts one or more target cytosine residue(s) in a single-stranded bubble of a RNA duplex into uracil residues (s). In some embodiments, the cytidine deaminase protein recognizes a binding window on the single-stranded bubble of a RNA duplex. In some embodiments, the binding window contains at least one target cytosine residue(s). In some embodiments, the binding window is in the range of about 3 bp to about 100 bp. In some embodiments, the binding window is in the range of about 5 bp to about 50 bp. In some embodiments, the binding window is in the range of about 10 bp to about 30 bp. In some embodiments, the binding window is about 1 bp, 2 bp, 3 bp, 5 bp, 7 bp, 10 bp, 15 bp, 20 bp, 25 bp, 30 bp, 40 bp, 45 bp, 50 bp, 55 bp, 60 bp, 65 bp, 70 bp, 75 bp, 80 bp, 85 bp, 90 bp, 95 bp, or 100 bp.

[0468] In some embodiments, the cytidine deaminase protein comprises one or more deaminase domains. Not intended to be bound by theory, it is contemplated that the deaminase domain functions to recognize and convert one or more target cytosine (C) residue(s) contained in a single-stranded bubble of a RNA duplex into (an) uracil (U) residue (s). In some embodiments, the deaminase domain comprises an active center. In some embodiments, the active center comprises a zinc ion. In some embodiments, amino acid residues in or near the active center interact with one or more nucleotide(s) 5′ to a target cytosine residue. In some embodiments, amino acid residues in or near the active center interact with one or more nucleotide(s) 3′ to a target cytosine residue.

[0469] In some embodiments, the cytidine deaminase comprises human APOBEC1 full protein (hAPOBEC1) or the deaminase domain thereof (hAPOBEC1-D) or a C-terminally truncated version thereof (hAPOBEC-T). In some embodiments, the cytidine deaminase is an APOBEC family member that is homologous to hAPOBEC1, hAPOBEC-D or hAPOBEC-T. In some embodiments, the cytidine deaminase comprises human AID1 full protein (hAID) or the deaminase domain thereof (hAID-D) or a C-terminally truncated version thereof (hAID-T). In some embodiments, the cytidine deaminase is an AID family member that is homologous to hAID, hAID-D or hAID-T. In some embodiments, the hAID-T is a hAID which is C-terminally truncated by about 20 amino acids.

[0470] In some embodiments, the cytidine deaminase comprises the wild-type amino acid sequence of a cytosine deaminase. In some embodiments, the cytidine deaminase comprises one or more mutations in the cytosine deaminase sequence, such that the editing efficiency, and/or substrate editing preference of the cytosine deaminase is changed according to specific needs.

[0471] Certain mutations of APOBEC1 and APOBEC3 proteins have been described in Kim et al., Nature Biotechnology (2017) 35(4):371-377 (doi:10.1038/nbt.3803); and Harris et al. Mol. Cell (2002) 10:1247-1253, each of which is incorporated herein by reference in its entirety.

[0472] In some embodiments, the cytidine deaminase is an APOBEC1 deaminase comprising one or more mutations at amino acid positions corresponding to W90, R118, H121, H122, R126, or R132 in rat APOBEC1, or an APOBEC3G deaminase comprising one or more mutations at amino acid positions corresponding to W285, R313, D316, D317X, R320, or R326 in human APOBEC3 G.

[0473] In some embodiments, the cytidine deaminase comprises a mutation at tryptophane⁹⁰ of the rat APOBEC1 amino acid sequence, or a corresponding position in a homologous APOBEC protein, such as tryptophane²⁸⁵ of APOBEC3G. In some embodiments, the tryptophane residue at position 90 is replaced by an tyrosine or phenylalanine residue (W90Y or W90F).

[0474] In some embodiments, the cytidine deaminase comprises a mutation at Arginine¹¹⁸ of the rat APOBEC1 amino acid sequence, or a corresponding position in a homologous APOBEC protein. In some embodiments, the arginine residue at position 118 is replaced by an alanine residue (R118A).

[0475] In some embodiments, the cytidine deaminase comprises a mutation at Histidine¹²¹ of the rat APOBEC1 amino acid sequence, or a corresponding position in a homologous APOBEC protein. In some embodiments, the histidine residue at position 121 is replaced by an arginine residue (H121R).

[0476] In some embodiments, the cytidine deaminase comprises a mutation at Histidine¹²² of the rat APOBEC1 amino acid sequence, or a corresponding position in a homologous APOBEC protein. In some embodiments, the histidine residue at position 122 is replaced by an arginine residue (H122R).

[0477] In some embodiments, the cytidine deaminase comprises a mutation at Arginine¹²⁶ of the rat APOBEC1 amino acid sequence, or a corresponding position in a homologous APOBEC protein, such as Arginine³²⁰ of APOBEC3G. In some embodiments, the arginine residue at position 126 is replaced by an alanine residue (R126A) or by a glutamic acid (R126E).

[0478] In some embodiments, the cytidine deaminase comprises a mutation at arginine¹³² of the APOBEC1 amino acid sequence, or a corresponding position in a homologous APOBEC protein. In some embodiments, the arginine residue at position 132 is replaced by a glutamic acid residue (R132E).

[0479] In some embodiments, to narrow the width of the editing window, the cytidine deaminase may comprise one or more of the mutations: W90Y, W90F, R126E and R132E, based on amino acid sequence positions of rat APOBEC1, and mutations in a homologous APOBEC protein corresponding to the above.

[0480] In some embodiments, to reduce editing efficiency, the cytidine deaminase may comprise one or more of the mutations: W90A, R118A, R132E, based on amino acid sequence positions of rat APOBEC1, and mutations in a homologous APOBEC protein corresponding to the above. In particular embodiments, it can be of interest to use a cytidine deaminase enzyme with reduced efficacy to reduce off-target effects.

[0481] In some embodiments, the cytidine deaminase is wild-type rat APOBEC1 (rAPOBEC1, or a catalytic domain thereof. In some embodiments, the cytidine deaminase comprises one or more mutations in the rAPOBEC1 sequence, such that the editing efficiency, and/or substrate editing preference of rAPOBEC1 is changed according to specific needs.

rAPOBEC1:
(SEQ ID NO: 42)
[sequence omitted]

[0482] In some embodiments, the cytidine deaminase is wild-type human APOBEC1 (hAPOBEC1) or a catalytic domain thereof. In some embodiments, the cytidine deaminase comprises one or more mutations in the hAPOBEC1 sequence, such that the editing efficiency, and/or substrate editing preference of hAPOBEC1 is changed according to specific needs.

APOBEC1:
(SEQ ID NO: 43)
MTSEKGPSTGDPTLRRRIEPWEFDVFYDPRELRKEACLLYEIKWGMSRKI
WRSSGKNTTNHVEVNFIKKFTSERDFHPSMSCSITWFLSWSPCWECSQAI
REFLSRHPGVTLVIYVARLFWHMDQQNRQGLRDLVNSGVTIQIMRASEYY
HCWRNFVNYPPGDEAHWPQYPPLWMMLYALELHCIILSLPPCLKISRRWQ
NHLTFFRLHLQNCHYQTIPPHILLATGLIHPSVAWR

[0483] In some embodiments, the cytidine deaminase is wild-type human APOBEC3G (hAPOBEC3G) or a catalytic domain thereof. In some embodiments, the cytidine deaminase comprises one or more mutations in the hAPOBEC3G sequence, such that the editing efficiency, and/or substrate editing preference of hAPOBEC3G is changed according to specific needs.

hAPOBEC3G:
(SEQ ID NO: 44)
MELKYHPEMRFFHWFSKWRKLHRDQEYEVTWYISWSPCTKCTRDMATFLA
EDPKVTLTIFVARLYYFWDPDYQEALRSLCQKRDGPRATMKIMNYDEFQH
CWSKFVYSQRELFEPWNNLPKYYILLHIMLGEILRHSMDPPTFTFNFNNE
PWVRGRHETYLCYEVERMHNDTWVLLNQRRGFLCNQAPHKHGFLEGRHAE
LCFLDVIPFWKLDLDQDYRVTCFTSWSPCFSCAQEMAKFISKNKHVSLCI
FTARIYDDQGRCQEGLRTLAEAGAKISIMTYSEFKHCWDTFVDHQGCPFQ
PWDGLDEHSQDLSGRLRAILQNQEN

[0484] In some embodiments, the cytidine deaminase is wild-type Petromyzon marinus CDA1 (pmCDA1) or a catalytic domain thereof. In some embodiments, the cytidine deaminase comprises one or more mutations in the pmCDA1 sequence, such that the editing efficiency, and/or substrate editing preference of pmCDA1 is changed according to specific needs.

pmCDA1:
(SEQ ID NO: 45)
MTDAEYVRIHEKLDIYTFKKQFFNNKKSVSHRCYVLFELKRRGERRACFW
GYAVNKPQSGTERGIHAEIFSIRKVEEYLRDNPGQFTINWYSSWSPCADC
AEKILEWYNQELRGNGHTLKIWACKLYYEKNARNQIGLWNLRDNGVGLNV
MVSEHYQCCRKIFIQSSHNQLNENRWLEKTLKRAEKRRSELSIMIQVKIL
HTTKSPAV

[0485] In some embodiments, the cytidine deaminase is wild-type human AID (hAID) or a catalytic domain thereof. In some embodiments, the cytidine deaminase comprises one or more mutations in the pmCDA1 sequence, such that the editing efficiency, and/or substrate editing preference of pmCDA1 is changed according to specific needs.

hAID:
(SEQ ID NO: 46)
MDSLLMNRRKFLYQFKNVRWAKGRRETYLCYVVKRRDSATSFSLDFGYLR
NKNGCHVELLFLRYISDWDLDPGRCYRVTWFTSWSPCYDCARHVADFLRG
NPYLSLRIFTARLYFCEDRKAEPEGLRRLHRAGVQIAIMTFKDYFYCWNT
FVENHERTFKAWEGLHENSVRLSRQLRRILLPLYEVDDLRDAFRTLGLLD

[0486] In some embodiments, the cytidine deaminase is truncated version of hAID (hAID-DC) or a catalytic domain thereof. In some embodiments, the cytidine deaminase comprises one or more mutations in the hAID-DC sequence, such that the editing efficiency, and/or substrate editing preference of hAID-DC is changed according to specific needs.

hAID-DC:
(SEQ ID NO: 47)
MDSLLMNRRKFLYQFKNVRWAKGRRETYLCYVVKRRDSATSFSLDFGYLR
NKNGCHVELLFLRYISDWDLDPGRCYRVTWFTSWSPCYDCARHVADFLRG
NPNLSLRIFTARLYFCEDRKAEPEGLRRLHRAGVQIAIMTFKDYFYCWNT
FVENHERTFKAWEGLHENSVRLSRQLRRILL

[0487] Additional embodiments of the cytidine deaminase are disclosed in WO WO2017/070632, titled “Nucleobase Editor and Uses Thereof,” which is incorporated herein by reference in its entirety.

[0488] In some embodiments, the cytidine deaminase has an efficient deamination window that encloses the nucleotides susceptible to deamination editing. Accordingly, in some embodiments, the “editing window width” refers to the number of nucleotide positions at a given target site for which editing efficiency of the cytidine deaminase exceeds the half-maximal value for that target site. In some embodiments, the cytidine deaminase has an editing window width in the range of about 1 to about 6 nucleotides. In some embodiments, the editing window width of the cytidine deaminase is 1, 2, 3, 4, 5, or 6 nucleotides.

[0489] Not intended to be bound by theory, it is contemplated that in some embodiments, the length of the linker sequence affects the editing window width. In some embodiments, the editing window width increases (e.g., from about 3 to about 6 nucleotides) as the linker length extends (e.g., from about 3 to about 21 amino acids). In a non-limiting example, a 16-residue linker offers an efficient deamination window of about 5 nucleotides. In some embodiments, the length of the guide RNA affects the editing window width. In some embodiments, shortening the guide RNA leads to a narrowed efficient deamination window of the cytidine deaminase.

[0490] In some embodiments, mutations to the cytidine deaminase affect the editing window width. In some embodiments, the cytidine deaminase component of the CD-functionalized CRISPR system comprises one or more mutations that reduce the catalytic efficiency of the cytidine deaminase, such that the deaminase is prevented from deamination of multiple cytidines per DNA binding event. In some embodiments, tryptophan at residue 90 (W90) of APOBEC1 or a corresponding tryptophan residue in a homologous sequence is mutated. In some embodiments, the catalytically inactive Cas13 is fused to or linked to an APOBEC1 mutant that comprises a W90Y or W90F mutation. In some embodiments, tryptophan at residue 285 (W285) of APOBEC3G, or a corresponding tryptophan residue in a homologous sequence is mutated. In some embodiments, the catalytically inactive Cas13 is fused to or linked to an APOBEC3G mutant that comprises a W285Y or W285F mutation.

[0491] In some embodiments, the cytidine deaminase component of CD-functionalized CRISPR system comprises one or more mutations that reduce tolerance for non-optimal presentation of a cytidine to the deaminase active site. In some embodiments, the cytidine deaminase comprises one or more mutations that alter substrate binding activity of the deaminase active site. In some embodiments, the cytidine deaminase comprises one or more mutations that alter the conformation of DNA to be recognized and bound by the deaminase active site. In some embodiments, the cytidine deaminase comprises one or more mutations that alter the substrate accessibility to the deaminase active site. In some embodiments, arginine at residue 126 (R126) of APOBEC1 or a corresponding arginine residue in a homologous sequence is mutated. In some embodiments, the catalytically inactive Cas13 is fused to or linked to an APOBEC1 that comprises a R126A or R126E mutation. In some embodiments, tryptophan at residue 320 (R320) of APOBEC3G, or a corresponding arginine residue in a homologous sequence is mutated. In some embodiments, the catalytically inactive Cas13 is fused to or linked to an APOBEC3G mutant that comprises a R320A or R320E mutation. In some embodiments, arginine at residue 132 (R132) of APOBEC1 or a corresponding arginine residue in a homologous sequence is mutated. In some embodiments, the catalytically inactive Cas13 is fused to or linked to an APOBEC1 mutant that comprises a R132E mutation.

[0492] In some embodiments, the APOBEC1 domain of the CD-functionalized CRISPR system comprises one, two, or three mutations selected from W90Y, W90F, R126A, R126E, and R132E. In some embodiments, the APOBEC1 domain comprises double mutations of W90Y and R126E. In some embodiments, the APOBEC1 domain comprises double mutations of W90Y and R132E. In some embodiments, the APOBEC1 domain comprises double mutations of R126E and R132E. In some embodiments, the APOBEC1 domain comprises three mutations of W90Y, R126E and R132E.

[0493] In some embodiments, one or more mutations in the cytidine deaminase as disclosed herein reduce the editing window width to about 2 nucleotides. In some embodiments, one or more mutations in the cytidine deaminase as disclosed herein reduce the editing window width to about 1 nucleotide. In some embodiments, one or more mutations in the cytidine deaminase as disclosed herein reduce the editing window width while only minimally or modestly affecting the editing efficiency of the enzyme. In some embodiments, one or more mutations in the cytidine deaminase as disclosed herein reduce the editing window width without reducing the editing efficiency of the enzyme. In some embodiments, one or more mutations in the cytidine deaminase as disclosed herein enable discrimination of neighboring cytidine nucleotides, which would be otherwise edited with similar efficiency by the cytidine deaminase.

[0494] In some embodiments, the cytidine deaminase protein further comprises or is connected to one or more double-stranded RNA (dsRNA) binding motifs (dsRBMs) or domains (dsRBDs) for recognizing and binding to double-stranded nucleic acid substrates. In some embodiments, the interaction between the cytidine deaminase and the substrate is mediated by one or more additional protein factor(s), including a CRISPR/CAS protein factor. In some embodiments, the interaction between the cytidine deaminase and the substrate is further mediated by one or more nucleic acid component(s), including a guide RNA.

[0495] According to the present invention, the substrate of the cytidine deaminase is an DNA single strand bubble of a RNA duplex comprising a Cytosine of interest, made accessible to the cytidine deaminase upon binding of the guide molecule to its DNA target which then forms the CRISPR-Cas complex with the CRISPR-Cas enzyme, whereby the cytosine deaminase is fused to or is capable of binding to one or more components of the CRISPR-Cas complex, i.e. the CRISPR-Cas enzyme and/or the guide molecule. The particular features of the guide molecule and CRISPR-Cas enzyme are detailed below.

[0496] The cytidine deaminase or catalytic domain thereof may be a human, a rat, or a lamprey cytidine deaminase protein or catalytic domain thereof.

[0497] The cytidine deaminase protein or catalytic domain thereof may be an apolipoprotein B mRNA-editing complex (APOBEC) family deaminase. The cytidine deaminase protein or catalytic domain thereof may be an activation-induced deaminase (AID). The cytidine deaminase protein or catalytic domain thereof may be a cytidine deaminase 1 (CDA1).

[0498] The cytidine deaminase protein or catalytic domain thereof may be an APOBEC1 deaminase. The APOBEC1 deaminase may comprise one or more mutations corresponding to W90A, W90Y, R118A, H121R, H122R, R126A, R126E, or R132E in rat APOBEC1, or an APOBEC3G deaminase comprising one or more mutations corresponding to W285A, W285Y, R313A, D316R, D317R, R320A, R320E, or R326E in human APOBEC3G.

[0499] The system may further comprise a uracil glycosylase inhibitor (UGI). Inn some embodiments, the cytidine deaminase protein or catalytic domain thereof is delivered together with a uracil glycosylase inhibitor (UGI). The GI may be linked (e.g., covalently linked) to the cytidine deaminase protein or catalytic domain thereof and/or a catalytically inactive Cas13 protein.

### Base Excision Repair Inhibitor

[0500] In some embodiments, the systems further comprises a base excision repair (BER) inhibitor. Without wishing to be bound by any particular theory, cellular DNA-repair response to the presence of I:T pairing may be responsible for a decrease in nucleobase editing efficiency in cells. Alkyladenine DNA glycosylase (also known as DNA-3-methyladenine glycosylase, 3-alkyladenine DNA glycosylase, or N-methylpurine DNA glycosylase) catalyzes removal of hypoxanthine from DNA in cells, which may initiate base excision repair, with reversion of the I:T pair to a A:T pair as outcome.

[0501] In some embodiments, the BER inhibitor is an inhibitor of alkyladenine DNA glycosylase. In some embodiments, the BER inhibitor is an inhibitor of human alkyladenine DNA glycosylase. In some embodiments, the BER inhibitor is a polypeptide inhibitor. In some embodiments, the BER inhibitor is a protein that binds hypoxanthine. In some embodiments, the BER inhibitor is a protein that binds hypoxanthine in DNA. In some embodiments, the BER inhibitor is a catalytically inactive alkyladenine DNA glycosylase protein or binding domain thereof. In some embodiments, the BER inhibitor is a catalytically inactive alkyladenine DNA glycosylase protein or binding domain thereof that does not excise hypoxanthine from the DNA. Other proteins that are capable of inhibiting (e.g., sterically blocking) an alkyladenine DNA glycosylase base-excision repair enzyme are within the scope of this disclosure. Additionally, any proteins that block or inhibit base-excision repair as also within the scope of this disclosure.

[0502] Without wishing to be bound by any particular theory, base excision repair may be inhibited by molecules that bind the edited strand, block the edited base, inhibit alkyladenine DNA glycosylase, inhibit base excision repair, protect the edited base, and/or promote fixing of the non-edited strand. It is believed that the use of the BER inhibitor described herein can increase the editing efficiency of an adenosine deaminase that is capable of catalyzing a A to I change.

[0503] Accordingly, in the first design of the AD-functionalized CRISPR system discussed above, the CRISPR-Cas protein or the adenosine deaminase can be fused to or linked to a BER inhibitor (e.g., an inhibitor of alkyladenine DNA glycosylase). In some embodiments, the BER inhibitor can be comprised in one of the following structures (nCas13=Cas13 nickase; dCas13=dead Cas13); [AD]-[optional linker]-[nCas13/dCas13]-[optional linker]-[BER inhibitor]; [AD]-[optional linker]-[BER inhibitor]-[optional linker]-[nCas13/dCas13]; [BER inhibitor]-[optional linker]-[AD]-[optional linker]-[nCas13/dCas13]; [BER inhibitor]-[optional linker]-[nCas13/dCas13]-[optional linker]-[AD]; [nCas13/dCas13]-[optional linker]-[AD]-[optional linker]-[BER inhibitor]; [nCas13/dCas13]-[optional linker]-[BER inhibitor]-[optional linker]-[AD].

[0504] Similarly, in the second design of the AD-functionalized CRISPR system discussed above, the CRISPR-Cas protein, the adenosine deaminase, or the adaptor protein can be fused to or linked to a BER inhibitor (e.g., an inhibitor of alkyladenine DNA glycosylase). In some embodiments, the BER inhibitor can be comprised in one of the following structures (nCas13=Cas13 nickase; dCas13=dead Cas13): [nCas13/dCas13]-[optional linker]-[BER inhibitor]; [BER inhibitor]-[optional linker]-[nCas13/dCas13]; [AD]-[optional linker]-[Adaptor]-[optional linker]-[BER inhibitor]; [AD]-[optional linker]-[BER inhibitor]-[optional linker]-[Adaptor]; [BER inhibitor]-[optional linker]-[AD]-[optional linker]-[Adaptor]; [BER inhibitor]-[optional linker]-[Adaptor]-[optional linker]-[AD]; [Adaptor]-[optional linker]-[AD]-[optional linker]-[BER inhibitor]; [Adaptor]-[optional linker]-[BER inhibitor]-[optional linker]-[AD].

[0505] In the third design of the AD-functionalized CRISPR system discussed above, the BER inhibitor can be inserted into an internal loop or unstructured region of a CRISPR-Cas protein.

### Linker

[0506] In some embodiments, the nucleotide deaminase protein or catalytic domain thereof is linked to the CRISPR-Cas protein, e.g., dead Cas13 protein. Alternatively or additionally, the nucleotide deaminase protein or catalytic domain thereof may be linked to the guide molecule. In certain cases, the nucleotide deaminase protein or catalytic domain thereof may be adapted to link to the CRISPR-Cas protein or the guide molecule after delivered to the target sequence or locus of interest. In certain cases, the link between the nucleotide deaminase protein or catalytic domain thereof and the CRISPR-Cas protein may be covalent. In certain cases, the link between the nucleotide deaminase protein or catalytic domain thereof and the CRISPR-Cas protein may be non-covalent. In certain cases, the link between the nucleotide deaminase protein or catalytic domain thereof and the guide molecule may be covalent. In certain cases, the link between the nucleotide deaminase protein or catalytic domain thereof and the guide molecule may be non-covalent.

[0507] In some cases, the nucleotide deaminase protein or catalytic domain thereof is fused to a dead Cas13 protein. In some cases, the nucleotide deaminase protein or catalytic domain thereof is fused to the N-terminus of the dead Cas13 protein. Alternatively or additionally, the nucleotide deaminase protein or catalytic domain thereof is fused to the C-terminus of the dead Cas13 protein. In some examples, the nucleotide deaminase protein or catalytic domain thereof is fused to a dead Cas13 protein by a linker.

[0508] The term “linker” as used in reference to a fusion protein refers to a molecule which joins the proteins to form a fusion protein. Generally, such molecules have no specific biological activity other than to join or to preserve some minimum distance or other spatial relationship between the proteins. However, in certain embodiments, the linker may be selected to influence some property of the linker and/or the fusion protein such as the folding, net charge, or hydrophobicity of the linker.

[0509] Suitable linkers for use in the methods of the present invention are well known to those of skill in the art and include, but are not limited to, straight or branched-chain carbon linkers, heterocyclic carbon linkers, or peptide linkers. However, as used herein the linker may also be a covalent bond (carbon-carbon bond or carbon-heteroatom bond). In particular embodiments, the linker is used to separate the CRISPR-Cas protein and the nucleotide deaminase by a distance sufficient to ensure that each protein retains its required functional property. Preferred peptide linker sequences adopt a flexible extended conformation and do not exhibit a propensity for developing an ordered secondary structure. In certain embodiments, the linker can be a chemical moiety which can be monomeric, dimeric, multimeric or polymeric. Preferably, the linker comprises amino acids. Typical amino acids in flexible linkers include Gly, Asn and Ser. Accordingly, in particular embodiments, the linker comprises a combination of one or more of Gly, Asn and Ser amino acids. Other near neutral amino acids, such as Thr and Ala, also may be used in the linker sequence. Exemplary linkers are disclosed in Maratea et al. (1985), Gene 40: 39-46; Murphy et al. (1986) Proc. Nat'l. Acad. Sci. USA 83: 8258-62; U.S. Pat. Nos. 4,935,233; and 4,751,180. For example, GlySer linkers GGS, GGGS or GSG can be used. GGS, GSG, GGGS or GGGGS linkers can be used in repeats of 3 (such as (GGS)₃ (SEQ ID No. 12), (GGGGS)₃) or 5, 6, 7, 9 or even 12 (SEQ ID No. 13) or more, to provide suitable lengths. In some cases, the linker may be (GGGGS)₃₋₁₅, For example, In some cases, the linker may be (GGGGS)₃₋₁₁, e.g., GGGGS, (GGGGS)₂, (GGGGS)₃, (GGGGS)₄, (GGGGS)₅, (GGGGS)₆, (GGGGS)₇, (GGGGS)₈, (GGGGS)₉, (GGGGS)₁₀, or (GGGGS)₁₁.

[0510] In particular embodiments, linkers such as (GGGGS)₃ are preferably used herein. (GGGGS)₆ (GGGGS)₉ or (GGGGS)₁₂ may preferably be used as alternatives. Other preferred alternatives are (GGGGS)₁ (SEQ ID No 14), (GGGGS)₂ (SEQ ID No. 15), (GGGGS)₄, (GGGGS)₅, (GGGGS)₇, (GGGGS)₈, (GGGGS)₁₀, or (GGGGS)₁₁. In yet a further embodiment, LEPGEKPYKCPECGKSFSQSGALTRHQRTHTR (SEQ ID No:11) is used as a linker. In yet an additional embodiment, the linker is an XTEN linker. In particular embodiments, the CRISPR-cas protein is a Cas13 protein and is linked to the deaminase protein or its catalytic domain by means of an LEPGEKPYKCPECGKSFSQSGALTRHQRTHTR (SEQ ID No. 11) linker. In further particular embodiments, the Cas13 protein is linked C-terminally to the N-terminus of a deaminase protein or its catalytic domain by means of an LEPGEKPYKCPECGKSFSQSGALTRHQRTHTR (SEQ ID No. 11) linker. In addition, N- and C-terminal NLSs can also function as linker (e.g., PKKKRKVEASSPKKRKVEAS (SEQ ID No. 16)).

[0511] Examples of linkers are shown in the table below.

| | |
|---|---|
| GGS | GGTGGTAGT |
| GGSx3 | GGTGGTAGTGGAGGGAGCGGCGGTTCA |
| (9) | |
| GGSx7 | ggtggaggaggctctggtggaggcggtagcggaggcgg |
| (21) | agggtcgGGTGGTAGTGGAGGGAGCGGCGGTTCA |
| XTEN | TCGGGATCTGAGACGCCTGGGACCTCGGAATCGGCTAC |
| | GCCCGAAAGT |
| Z-EGFR_ | gtggataacaaatttaacaaagaaatgtgggcggcgtg |
| Short | ggaagaaattcgtaacctgccgaacctgaacggctggc |
| | agatgaccgcgtttattgcgagcctggtggatgatccg |
| | agccagagcgcgaacctgctggcggaagcgaaaaaact |
| | gaacgatgcgcaggcgccgaaaaccggcggtggttctg |
| | gt |
| GSAT | ggtggttctgccggtggctccggttctggctccagcgg |
| | tggcagctctggtgcgtccggcacgggtactgcgggtg |
| | gcactggcagcggttccggtactggctctggc |

### Adaptor Protein

[0512] In particular embodiments of the methods and systems of the present invention, the nucleotide deaminase protein or catalytic domain thereof is delivered to the cell or expressed within the cell as a separate protein, but is modified so as to be able to link to either the Cas13 protein or the guide molecule. In particular embodiments, this is ensured by the use of an RNA-binding protein (orthogonal RNA-binding protein) or adaptor protein/aptamer combinations (e.g., those exist within the diversity of bacteriophage coat proteins).

[0513] In some embodiments, the nucleotide deaminase protein or catalytic domain thereof is linked to an adaptor protein. The guide sequence or the dead Cas protein (e.g., dead Cas13 protein) may be capable of binding to the adaptor protein. For example, the guide sequence or the dead Cas protein may comprise a nucleic acid sequence capable of binding to the adaptor protein. In some case, the nucleic acid sequence may be an aptamer sequence capable of binding to the adaptor protein. Examples of such adaptor proteins include but are not limited to: MS2, PP7, Qβ, F2, GA, fr, JP501, M12, R17, BZ13, JP34, JP500, KU1, M11, MX1, TW18, VK, SP, FI, ID2, NL95, TW19, AP205, ϕCb5, ϕCb8r, ϕCb12r, ϕCb23r, 7s and PRR1. The Aptamers can be naturally occurring or synthetic oligonucleotides that have been engineered through repeated rounds of in vitro selection or SELEX (systematic evolution of ligands by exponential enrichment) to bind to a specific target.

### RNA-Binding Protein

[0514] In certain example embodiments, the nucleotide deaminase protein is recruited to the target locus of interest by fusion or linkage to a RNA-binding protein or RNA-binding functional domain thereof. The RNA-binding protein may bind a sequence, motif, or structural feature of the at or adjacent to the target locus. A structural feature may include hairpins, tetraloops, or other secondary structural features of a nucleic acid. As used herein “adjacent” means within a distance and/or orientation of the target locus in which the nucleotide deaminase can complete its base editing function. In certain example embodiments, the RNA-binding protein or functional domain thereof may bind a sequence, motif, or structural sequence of a guide molecule. The guide molecule comprises a sequence that hybridizes to the target loci of interest and thereby directs the nucleotide deaminase to the target loci.

[0515] In certain example embodiments, the RNA-binding protein or functional domain thereof comprises a RNA recognition motif. Example RNA-binding proteins comprising a RNA recognition motif include, but are not limited to, A2BP1; ACF; BOLL; BRUNOL4; BRUNOL5; BRUNOL6; CCBL2; CGI96; CIRBP; CNOT4; CPEB2; CPEB3; CPEB4; CPSF7; CSTF2; CSTF2T; CUGBP1; CUGBP2; D10S102; DAZ1; DA Z2; DAZ3; DAZ4; DAZAP1; DAZL; DNAJC17; DND1; EIF3S4; EIF3S9; EIF4B; EIF4H; ELA VL1; ELAVL2; ELAVL3; ELAVL4; ENOX1; ENOX2; EWSR1; FUS; FUSIP1; G3BP; G3BP1; G3BP2; GRSF 1; HNRNPL; HNRPA0; HNRPA1; HNRPA2B1; HNRPA3; HNRPAB; HNRPC; HNRPCL1; HNRPD; HNRPDL; HNRPF; HNRPH1; HNRPH2; HNRPH3; HNRPL; HNRPLL; HNRPM; HNRPR; HRNBP1; HSU53209; HTATSF1; IGF2BP1; IGF2BP2; IGF2BP3; LARP7; MKI67IP; MSI1; MSI2; MSSP2; MTHFSD; MYEF2; NCBP2; NCL; NOL8; NONO; P14; PAB PC1; PABPC1L; PABPC3; PABPC4; PABPC5; PABPN1; POLDIP3; PPARGC1; PPARGC1A; PPARGC1B; PPIE; PPIL4; PPRC1; PSPC1; PTBP1; PTBP2; PUF60; RALY; RALYL; RAVER 1; RAVER2; RBM10; RBM11; RBM12; RBM12B; RBM14; RBM15; RBM15B; RBM16; RB M17; RBM18; RBM19; RBM22; RBM23; RBM24; RBM25; RBM26; RBM27; RBM28; RBM3; RBM32B; RBM33; RBM34; RBM35A; RBM35B; RBM38; RBM39; RBM4; RBM41; RBM4 2; RBM44; RBM45; RBM46; RBM47; RBM4B; RBM5; RBM7; RBM8A; RBM9; RBMS1; RB MS2; RBMS3; RBMX; RBMX2; RBMXL2; RBMY1A1; RBMY1B; RBMY1E; RBMY1F; RB MY2FP; RBPMS; RBPMS2; RDBP; RNPC3; RNPC4; RNPS1; ROD1; SAFB; SAFB2; SART3; SETD1A; SF3B14; SF3B4; SFPQ; SFRS1; SFRS10; SFRS11; SFRS12; SFRS15; SFRS2; SFR S2B; SFRS3; SFRS4; SFRS5; SFRS6; SFRS7; SFRS9; SLIRP; SLTM; SNRP70; SNRPA; SNR PB2; SPEN; SR140; SRRP35; SSB; SYNCRIP; TAF15; TARDBP; THOC4; TIA1; TIAL1; TN RC4; TNRC6C; TRA2A; TRSPAP1; TUT1; U1SNRNPBP; U2AF 1; U2AF2; UHMK1; ZCRB1; ZNF638; ZRSR1; and ZRSR2.

[0516] In certain example embodiments, the RNA-binding protein or function domain thereof may comprise a K homology domain. Example RNA-binding proteins comprising a K homology domain include, but are not limited to, AKAP1; ANKHD1; ANKRD17; ASCC1; BICC1; DDX43; DDX53; DPPA5; FMR1; FUBP1; F UBP3; FXR1; FXR2; GLD1; HDLBP; HNRPK; IGF2BP1; IGF2BP2; IGF2BP3; KHDRBS1; K HDRBS2; KHDRBS3; KHSRP; KRR1; MEX3A; MEX3B; MEX3C; MEX3D; NOVA1; NOVA 2; PCBP1; PCBP2; PCBP3; PCBP4; PNO1; PNPT1; QKI; SF1; and TDRKH

[0517] In certain example embodiments, the RNA-binding protein comprises a zinc finger motif. RNA-binding proteins or functional domains thereof may comprise a Cys2-His2, Gag-knuckle, Treble-clet, Zinc ribbon, Zn2/Cys6 class motif.

[0518] In certain example embodiments, the RNA-binding protein may comprise a Pumilio homology domain.

### Fusion Points

[0519] The nucleotide deaminase may be is lined to the dead Cas13 via one or more amino acids. In some cases, The nucleotide deaminase may be is lined to the dead Cas13b via one or more amino acids 411-429, 114-124, 197-241, and 607-624. The amino acid position may correspond to a Cas13b orthlog disclosed herein. In certain examples, the nucleotide deaminase may be is lined to the dead Cas13b via one or more amino acids corresponding to amino 411-429, 114-124, 197-241, and 607-624 of Prevotella buccae Cas13b.

[0520] deaminase protein or its catalytic domain by means of an LEPGEKPYKCPECGKSFSQSGALTRHQRTHTR (SEQ ID No. 11) linker. In addition, N- and C-terminal NLSs can also function as linker (e.g., PKKKRKVEASSPKKRKVEAS (SEQ ID No. 16)).

### Targeting to the Nucleus

[0521] In some embodiments, the methods of the present invention relate to modifying an Adenine in a target locus of interest, whereby the target locus is within a cell. In order to improve targeting of the CRISPR-Cas protein and/or the nucleotide deaminase protein or catalytic domain thereof used in the methods of the present invention to the nucleus, it may be advantageous to provide one or both of these components with one or more nuclear localization sequences (NLSs).

[0522] In preferred embodiments, the NLSs used in the context of the present invention are heterologous to the proteins. Non-limiting examples of NLSs include an NLS sequence derived from: the NLS of the SV40 virus large T-antigen, having the amino acid sequence PKKKRKV (SEQ ID No. 17) or PKKKRKVEAS (SEQ ID No. 18); the NLS from nucleoplasmin (e.g., the nucleoplasmin bipartite NLS with the sequence KRPAATKKAGQAKKKK (SEQ ID No. 19)); the c-myc NLS having the amino acid sequence PAAKRVKLD (SEQ ID No. 20) or RQRRNELKRSP (SEQ ID No. 21); the hRNPA1 M9 NLS having the sequence NQSSNFGPMKGGNFGGRSSGPYGGGGQYFAKPRNQGGY (SEQ ID No. 22); the sequence RMRIZFKNKGKDTAELRRRRVEVSVELRKAKKDEQILKRRNV (SEQ ID No. 23) of the IBB domain from importin-alpha; the sequences VSRKRPRP (SEQ ID No. 24) and PPKKARED (SEQ ID No. 25) of the myoma T protein; the sequence PQPKKKPL (SEQ ID No. 26) of human p53; the sequence SALIKKKKKMAP (SEQ ID No. 27) of mouse c-abl IV; the sequences DRLRR (SEQ ID No. 28) and PKQKKRK (SEQ ID No. 29) of the influenza virus NS1; the sequence RKLKKKIKKL (SEQ ID No. 30) of the Hepatitis virus delta antigen; the sequence REKKKFLKRR (SEQ ID No. 31) of the mouse Mx1 protein; the sequence KRKGDEVDGVDEVAKKKSKK (SEQ ID No. 32) of the human poly(ADP-ribose) polymerase; and the sequence RKCLQAGMNLEARKTKK (SEQ ID No. 33) of the steroid hormone receptors (human) glucocorticoid. In general, the one or more NLSs are of sufficient strength to drive accumulation of the DNA-targeting Cas protein in a detectable amount in the nucleus of a eukaryotic cell. In general, strength of nuclear localization activity may derive from the number of NLSs in the CRISPR-Cas protein, the particular NLS(s) used, or a combination of these factors. Detection of accumulation in the nucleus may be performed by any suitable technique. For example, a detectable marker may be fused to the nucleic acid-targeting protein, such that location within a cell may be visualized, such as in combination with a means for detecting the location of the nucleus (e.g., a stain specific for the nucleus such as DAPI). Cell nuclei may also be isolated from cells, the contents of which may then be analyzed by any suitable process for detecting protein, such as immunohistochemistry, Western blot, or enzyme activity assay. Accumulation in the nucleus may also be determined indirectly, such as by an assay for the effect of nucleic acid-targeting complex formation (e.g., assay for deaminase activity) at the target sequence, or assay for altered gene expression activity affected by DNA-targeting complex formation and/or DNA-targeting), as compared to a control not exposed to the CRISPR-Cas protein and deaminase protein, or exposed to a CRISPR-Cas and/or deaminase protein lacking the one or more NLSs.

[0523] The CRISPR-Cas and/or nucleotide deaminase proteins may be provided with 1 or more, such as with, 2, 3, 4, 5, 6, 7, 8, 9, 10, or more heterologous NLSs. In some embodiments, the proteins comprises about or more than about 1, 2, 3, 4, 5, 6, 7, 8, 9, 10, or more NLSs at or near the amino-terminus, about or more than about 1, 2, 3, 4, 5, 6, 7, 8, 9, 10, or more NLSs at or near the carboxy-terminus, or a combination of these (e.g., zero or at least one or more NLS at the amino-terminus and zero or at one or more NLS at the carboxy terminus). When more than one NLS is present, each may be selected independently of the others, such that a single NLS may be present in more than one copy and/or in combination with one or more other NLSs present in one or more copies. In some embodiments, an NLS is considered near the N- or C-terminus when the nearest amino acid of the NLS is within about 1, 2, 3, 4, 5, 10, 15, 20, 25, 30, 40, 50, or more amino acids along the polypeptide chain from the N- or C-terminus. In preferred embodiments of the CRISPR-Cas proteins, an NLS attached to the C-terminal of the protein.

[0524] In certain embodiments of the methods provided herein, the CRISPR-Cas protein and the deaminase protein are delivered to the cell or expressed within the cell as separate proteins. In these embodiments, each of the CRISPR-Cas and deaminase protein can be provided with one or more NLSs as described herein. In certain embodiments, the CRISPR-Cas and deaminase proteins are delivered to the cell or expressed with the cell as a fusion protein. In these embodiments one or both of the CRISPR-Cas and deaminase protein is provided with one or more NLSs. Where the nucleotide deaminase is fused to an adaptor protein (such as MS2) as described above, the one or more NLS can be provided on the adaptor protein, provided that this does not interfere with aptamer binding. In particular embodiments, the one or more NLS sequences may also function as linker sequences between the nucleotide deaminase and the CRISPR-Cas protein.

[0525] In certain embodiments, guides of the invention comprise specific binding sites (e.g. aptamers) for adapter proteins, which may be linked to or fused to an nucleotide deaminase or catalytic domain thereof. When such a guides forms a CRISPR complex (i.e. CRISPR-Cas protein binding to guide and target) the adapter proteins bind and, the nucleotide deaminase or catalytic domain thereof associated with the adapter protein is positioned in a spatial orientation which is advantageous for the attributed function to be effective.

[0526] The skilled person will understand that modifications to the guide which allow for binding of the adapter+nucleotide deaminase, but not proper positioning of the adapter+nucleotide deaminase (e.g. due to steric hindrance within the three dimensional structure of the CRISPR complex) are modifications which are not intended. The one or more modified guide may be modified at the tetra loop, the stem loop 1, stem loop 2, or stem loop 3, as described herein, preferably at either the tetra loop or stem loop 2, and most preferably at both the tetra loop and stem loop 2.

[0527] In some embodiments, a component (e.g., the dead Cas protein, the nucleotide deaminase protein or catalytic domain thereof, or a combination thereof) in the systems may comprise one or more nuclear export signals (NES), one or more nuclear localization signals (NLS), or any combinations thereof. In some cases, the NES may be an HIV Rev NES. In certain cases, the NES may be MAPK NES. When the component is a protein, the NES or NLS may be at the C terminus of component. Alternatively or additionally, the NES or NLS may be at the N terminus of component. In some examples, the Cas13 protein and optionally said nucleotide deaminase protein or catalytic domain thereof comprise one or more heterologous nuclear export signal(s) (NES(s)) or nuclear localization signal(s) (NLS(s)), preferably an HIV Rev NES or MAPK NES, preferably C-terminal.

### Vector Systems

[0528] In some embodiments, the system is a vector system comprising one or more vectors. The vector(s) may comprise one or more regulatory elements. The regulatory elements may be operably linked to nucleotide sequence(s) encoding components in the system. In certain examples, the regulatory element may operably linked to a nucleotide sequence encoding a guide molecule which comprises said guide sequence. In certain examples, the regulatory element may operably linked to a nucleotide sequence encoding a dead Cas protein (e.g., dead Cas13). In certain examples, he regulatory element may operably linked to a nucleotide sequence encoding nucleotide deaminase protein or catalytic domain thereof. In some embodiments, the element may be a promoter, e.g., a inducible promoter. In some embodiments, the vector may comprise (a) a first regulatory element operably linked to a nucleotide sequence encoding a guide molecule which comprises a guide sequence; (b) a second regulatory element operably linked to a nucleotide sequence encoding a dead Cas13 protein; and (c) a nucleotide sequence encoding an nucleotide deaminase protein or catalytic domain thereof which is under control of the first or the second regulatory element. In some embodiments, (a) a first regulatory element operably linked to a nucleotide sequence encoding a guide molecule which comprises a guide sequence; (b) a second regulatory element operably linked to a nucleotide sequence encoding the dead Cas13 protein; and (c) a nucleotide sequence encoding an nucleotide deaminase protein or catalytic domain thereof operably linked to a third regulatory element. In these cases, the nucleotide deaminase protein or catalytic domain thereof is adapted to link to said guide molecule or said Cas13 protein after expression. In some examples, the components (a), (b), and (c) above may be on the same vector. In certain examples, the components (a), (b), and (c) above may be on different vectors of the system.

### Modified Cells and Organisms

[0529] The present disclosure may also include cells (and progeny thereof), tissues, organs, organisms modified using the systems and methods described herein.

[0530] In some cases, the modified cell may comprise the system herein, or progeny of the modified cell. For example, the cell may comprises a hypoxanthine or a guanine in replace of an Adenine in a target RNA of interest in the cell compared to a corresponding cell not modified by the systems or methods herein.

[0531] The invention also relates to a modified cell obtained by the targeted deamination using the AD-functionalized CRISPR system, or progeny thereof, wherein the modified cell comprises an I or G in replace of the A in the target RNA sequence of interest compared to a corresponding cell before the targeted deamination. The modified cell can be a eukaryotic cell, such as an animal cell, a plant cell, an mammalian cell, or a human cell.

[0532] In some embodiments, the modified cell is a therapeutic T cell, such as a T cell suitable for CAR-T therapies. The modification may result in one or more desirable traits in the therapeutic T cell, including but not limited to, reduced expression of an immune checkpoint receptor (e.g., PDA, CTLA4), reduced expression of HLA proteins (e.g., B2M, HLA-A), and reduced expression of an endogenous TCR.

[0533] In some embodiments, the modified cell is an antibody-producing B cell. The modification may results in one or more desirable traits in the B cell, including but not limited to, enhanced antibody production.

[0534] The invention also relates to a modified non-human animal or a modified plant. The modified non-human animal can be a farm animal. The modified plant can be an agricultural crop.

[0535] The invention further relates to a method for cell therapy, comprising administering to a patient in need thereof the modified cell described herein, wherein the presence of the modified cell remedies a disease in the patient. In one embodiment, the modified cell for cell therapy is a CAR-T cell capable of recognizing and/or attacking a tumor cell. In another embodiment, the modified cell for cell therapy is a stem cell, such as a neural stem cell, a mesenchymal stem cell, a hematopoietic stem cell, or an iPSC cell.

[0536] The invention additionally relates to an engineered, non-naturally occurring system suitable for modifying an Adenine in a target locus of interest, comprising: a guide molecule which comprises a guide sequence, or a nucleotide sequence encoding the guide molecule; a CRISPR-Cas protein, or one or more nucleotide sequences encoding the CRISPR-Cas protein; an nucleotide deaminase protein or catalytic domain thereof, or one or more nucleotide sequences encoding; wherein the nucleotide deaminase protein or catalytic domain thereof is covalently or non-covalently linked to the CRISPR-Cas protein or the guide molecule or is adapted to link thereto after delivery; wherein the guide sequence is capable of hybridizing with a target sequence comprising an Adenine within an RNA polynucleotide of interest, but comprises a Cytosine at the position corresponding to the Adenine.

[0537] The invention additionally relates to an engineered, non-naturally occurring vector system suitable for modifying an Adenine in a target locus of interest, comprising one or more vectors comprising: a first regulatory element operably linked to one or more nucleotide sequences encoding a guide molecule which comprises a guide sequence; a second regulatory element operably linked to a nucleotide sequence encoding a CRISPR-Cas protein; and optionally a nucleotide sequence encoding an nucleotide deaminase protein or catalytic domain thereof which is under control of the first or second regulatory element or operably linked to a third regulatory element; wherein, if the nucleotide sequence encoding an nucleotide deaminase protein or catalytic domain thereof is operably linked to a third regulatory element, the nucleotide deaminase protein or catalytic domain thereof is adapted to link to the guide molecule or the Crispr-Cas protein after expression; wherein the guide sequence is capable of hybridizing with a target sequence comprising an Adenine within the target locus, but comprises a Cytosine at the position corresponding to the Adenine; wherein components (a), (b) and (c) are located on the same or different vectors of the system.

[0538] The invention additionally relates to in vitro, ex vivo or in vivo host cell or cell line or progeny thereof comprising the engineered, non-naturally occurring system or vector system described herein. The host cell can be a eukaryotic cell, such as an animal cell, a plant cell, an mammalian cell, or a human cell.

### Methods

[0539] In one aspect the present disclosure provides methods for modifying a nucleobase in a target nucleic acid sequence. The methods may comprise delivering the systems herein to a target sequence, e.g., a target RNA sequence. In certain examples, the nucleobase may be an Adenine. In certain examples, the nucleobase may be a cytosine. In some cases, the target nucleic acid sequence may be a target DNA sequence of interest or a target RNA sequence of interest. In some embodiments, the methods are for targeted deamination of adenine in RNA, more particularly in an RNA sequence of interest. According to the methods of the invention, the nucleotide deaminase (AD) protein is recruited specifically to the relevant Adenine in the RNA sequence of interest by a CRISPR-Cas complex which can specifically bind to a target sequence. In order to achieve this, the nucleotide deaminase protein can either be covalently linked to the CRISPR-Cas enzyme or be provided as a separate protein, but adapted so as to ensure recruitment thereof to the CRISPR-Cas complex.

[0540] In particular embodiments, of the methods of the present invention, recruitment of the nucleotide deaminase to the target locus is ensured by fusing the nucleotide deaminase or catalytic domain thereof to the CRISPR-Cas protein, which is a Cas13 protein. Methods of generating a fusion protein from two separate proteins are known in the art and typically involve the use of spacers or linkers. The Cas13 protein can be fused to the nucleotide deaminase protein or catalytic domain thereof on either the N- or C-terminal end thereof. In particular embodiments, the CRISPR-Cas protein is an inactive or dead Cas13 protein and is linked to the N-terminus of the deaminase protein or its catalytic domain.

### Post-Translational Modification

[0541] In certain example embodiments, the methods and systems disclosed herein may be used to silence or introduce sites of post-translational modifications on proteins encoded by the target RNA. For example, to silence a post-translation modification site of a protein encoded by the target RNA sequence, the method may comprise modifying a codon that encodes for an amino acid that is post-translationally modified to a codon that encodes for an amino acid that is not post-translationally modified. In certain examples, the modification prevents pathological activated cell-signaling mediated by the post-translational modification.

[0542] In certain example embodiments, methods and systems disclosed here may be used to increase or decrease a protein's half-life by modifying a RNA sequence encoding a degron of that protein. A degron is an amino acid sequence within a protein that controls protein degradation rates. Degrons can be structural motifs, short amino acids, and amino acids that are solvent-exposed (often lysine or arginine). For example, degron sequences can be set of amino acids such as the EMLA degron site in spinal muscular dystrophy, which causes degradation of SMN2 during exon skipping in the disease state. By changing the amino acids of this sequence, the half-life of SMN2 may be increased and the severity of disease reduced. The M can be converted to a V and the E can be converted to a G by nucleotide deaminase, and the L can be converted to a F and the A can be converted to a V by a nucleotide deaminase modified to catalyze deamination of cytidine. In some examples, degrons may be those described in Cho et al., Genes Dev. 2010 Mar. 1; 24(5): 438-442; Fortmann et al., J Mol Biol. 2015 Aug. 28; 427(17): 2748-2756; Dohmen et al., Science, 1994. 263(5151): p. 1273-1276; and Varshaysky A, PNAS Oct. 29, 1996 93 (22) 12142-12149.

[0543] Other modifications that can be modified using the methods and systems disclosed herein include lysine ubiquitination, methylation, acetylation, asuccinylation, glycosylation (e.g., N-linked glycosylation), O-GlcNAc, O-linked glycosylation, iodination, nitrosylation, sulfation, carboxyglutamation, phosphorylation, lysine methylation, lysine acetylation, or any combinations thereof.

[0544] In some embodiments, the modification is lysine ubiquitination, e.g., those described in Annemarthe G. van der Veen et al., Annual Review of Biochemistry, Vol. 81:323-357 (Volume publication date July 2012).

[0545] In certain example embodiments, the methods and systems disclosed herein may be used to silence pathologically activated cell-signaling mediated by one of the above modifications. For example. Acetylation of proteins is important for the function and activation of many cellular enzymes. Acetylation typically occurs at lysine residues. For example, p53 is acetylated at K164 and K120, preventing binding to MDM2 which inhibits p53 tumor suppressor role. In addition, microtubules need to be acetylated for stabilization so increasing or reducing acetylation can impact stability, with destabilization potential useful in cancer therapy. Friedman et al. PNAS, 109(48):19655-19660. The acetylation of 685K of STAT3 is important for STAT3 homo-dimerization, which is needed for binding to the genome and the transcriptional activation of cancer genes. STAT3 acetylation is catalyzed by histone acetyltransferase p300. The lysine acetylation of STAT3 is also elevated in cancer cells indicating a possible therapeutic intervention strategy for reducing acetylation and preventing oncogenesis. Yuan et al. Science, 307 (5707):269-273. In some examples, acetylation may be those described in Choudhary et al., Science 14 Aug. 2009:Vol. 325, Issue 5942, pp. 834-840; and Verdin et al., Nat Rev Mol Cell Biol. 2015 April; 16(4):258-64; Brooks C L, Gu W (2011). “The impact of acetylation and deacetylation on the p53 pathway”. Protein Cell. 2 (6): 456-462; Tang Y, Zhao W, Chen Y, Zhao Y, Gu W (2008). “Acetylation is indispensable for p53 activation”. Cell. 133 (4): 612-626.

[0546] Glycosylation is important in thrombin signaling (Soto et al. Journal of Biological Chemistry 285:18781-18793, 2010), reproductive functioning (Wheatly et al. Human Reproduction Update, 5(4):356-364, 1999), adrenergic receptor regulation (He et al. Biochemical and Biophysical Research Communications, 297(3):565-572, 2002), G-protein coupled receptor regulations (Lanctot et al. Bioechemical Journal, 390(1):367-376 2005, and Tansky et al. PNAS, 104(25):10691-10696 2007).

[0547] O-GlcNAc modification play a role in sensing nuetret status of the surrounding cellular environment (Slawson et al. J Cell Biochem, 2006, 97(1):71-83, 2006). In plants, O-GlcNAc impact diverse plant process including response to hormones and environmental signals, circadian rhythms, development, intracellular transport, and virus infection. Olszewski et al. Biochim Biphys Acta. 1800(2):49-56, 2010); Xu et al. PNAS, PNAS Feb. 21, 2017 114 (8) E1536-E1543.

[0548] Carboxyglutamation modification is integral to clotting. For example clotting efficiency may be modulated by reducing carboxylation of prothrombin (Ratcliffe et al. J Biol Chem. 268(32):24339=24345, 1993).

[0549] Other RNA modifications are also contemplated. N6 adenine methylation may be prevented using the methods and systems disclosed herein by deaminating the N6 position to prevent methylation. N6 adenine methylation is important to embryonic differentiation. (Geula et al. Science 347:1002-1006, 2015; Fustin et al. Cell 155:793-806, 2013; and Yue et al. Genes Dev. 29(13):1343-1355, 2015).

### Delivery

[0550] In some embodiments, the components of the systems (e.g., AD-functionalized CRISPR-Cas system) may be delivered in various form, such as combinations of DNA/RNA or RNA/RNA or protein RNA. For example, the Cas13 protein may be delivered as a DNA-coding polynucleotide or an RNA-coding polynucleotide or as a protein. The guide may be delivered may be delivered as a DNA-coding polynucleotide or an RNA. All possible combinations are envisioned, including mixed forms of delivery. In certain examples, the components of the systems may be delivered or to be delivered as one or more polynucleotide molecules, as a ribonucleoprotein complex, optionally via particles, vesicles, or one or more viral vectors.

[0551] In some aspects, the invention provides methods comprising delivering one or more polynucleotides, such as or one or more vectors as described herein, one or more transcripts thereof, and/or one or proteins transcribed therefrom, to a host cell.

### Vectors

[0552] In general, the term “vector” refers to a nucleic acid molecule capable of transporting another nucleic acid to which it has been linked. It is a replicon, such as a plasmid, phage, or cosmid, into which another DNA segment may be inserted so as to bring about the replication of the inserted segment. Generally, a vector is capable of replication when associated with the proper control elements Vectors include, but are not limited to, nucleic acid molecules that are single-stranded, double-stranded, or partially double-stranded; nucleic acid molecules that comprise one or more free ends, no free ends (e.g., circular); nucleic acid molecules that comprise DNA, RNA, or both; and other varieties of polynucleotides known in the art. One type of vector is a “plasmid,” which refers to a circular double stranded DNA loop into which additional DNA segments can be inserted, such as by standard molecular cloning techniques. Another type of vector is a viral vector, wherein virally-derived DNA or RNA sequences are present in the vector for packaging into a virus (e.g., retroviruses, replication defective retroviruses, adenoviruses, replication defective adenoviruses, and adeno-associated viruses). Viral vectors also include polynucleotides carried by a virus for transfection into a host cell. Certain vectors are capable of autonomous replication in a host cell into which they are introduced (e.g., bacterial vectors having a bacterial origin of replication and episomal mammalian vectors). Other vectors (e.g., non-episomal mammalian vectors) are integrated into the genome of a host cell upon introduction into the host cell, and thereby are replicated along with the host genome. Moreover, certain vectors are capable of directing the expression of genes to which they are operatively-linked. Such vectors are referred to herein as “expression vectors.” Vectors for and that result in expression in a eukaryotic cell can be referred to herein as “eukaryotic expression vectors.” Common expression vectors of utility in recombinant DNA techniques are often in the form of plasmids.

[0553] Recombinant expression vectors can comprise a nucleic acid of the invention in a form suitable for expression of the nucleic acid in a host cell, which means that the recombinant expression vectors include one or more regulatory elements, which may be selected on the basis of the host cells to be used for expression, that is operatively-linked to the nucleic acid sequence to be expressed. Within a recombinant expression vector, “operably linked” is intended to mean that the nucleotide sequence of interest is linked to the regulatory element(s) in a manner that allows for expression of the nucleotide sequence (e.g., in an in vitro transcription/translation system or in a host cell when the vector is introduced into the host cell). Advantageous vectors include lentiviruses and adeno-associated viruses, and types of such vectors can also be selected for targeting particular types of cells.

[0554] With regards to recombination and cloning methods, mention is made of U.S. patent application Ser. No. 10/815,730, published Sep. 2, 2004 as US 2004-0171156 A1, the contents of which are herein incorporated by reference in their entirety.

[0555] The term “regulatory element” is intended to include promoters, enhancers, internal ribosomal entry sites (IRES), and other expression control elements (e.g., transcription termination signals, such as polyadenylation signals and poly-U sequences). Such regulatory elements are described, for example, in Goeddel, GENE EXPRESSION TECHNOLOGY: METHODS IN ENZYMOLOGY 185, Academic Press, San Diego, Calif. (1990). Regulatory elements include those that direct constitutive expression of a nucleotide sequence in many types of host cell and those that direct expression of the nucleotide sequence only in certain host cells (e.g., tissue-specific regulatory sequences). A tissue-specific promoter may direct expression primarily in a desired tissue of interest, such as muscle, neuron, bone, skin, blood, specific organs (e.g., liver, pancreas), or particular cell types (e.g., lymphocytes). Regulatory elements may also direct expression in a temporal-dependent manner, such as in a cell-cycle dependent or developmental stage-dependent manner, which may or may not also be tissue or cell-type specific. In some embodiments, a vector comprises one or more pol III promoter (e.g., 1, 2, 3, 4, 5, or more pol III promoters), one or more pol II promoters (e.g., 1, 2, 3, 4, 5, or more pol II promoters), one or more pol I promoters (e.g., 1, 2, 3, 4, 5, or more pol I promoters), or combinations thereof. Examples of pol III promoters include, but are not limited to, U6 and H1 promoters. Examples of pol II promoters include, but are not limited to, the retroviral Rous sarcoma virus (RSV) LTR promoter (optionally with the RSV enhancer), the cytomegalovirus (CMV) promoter (optionally with the CMV enhancer) [see, e.g., Boshart et al, Cell, 41:521-530 (1985)], the SV40 promoter, the dihydrofolate reductase promoter, the β-actin promoter, the phosphoglycerol kinase (PGK) promoter, and the EF1α promoter. Also encompassed by the term “regulatory element” are enhancer elements, such as WPRE; CMV enhancers; the R-U5′ segment in LTR of HTLV-I (Mol. Cell. Biol., Vol. 8(1), p. 466-472, 1988); SV40 enhancer; and the intron sequence between exons 2 and 3 of rabbit β-globin (Proc. Natl. Acad. Sci. USA., Vol. 78(3), p. 1527-31, 1981). It will be appreciated by those skilled in the art that the design of the expression vector can depend on such factors as the choice of the host cell to be transformed, the level of expression desired, etc. A vector can be introduced into host cells to thereby produce transcripts, proteins, or peptides, including fusion proteins or peptides, encoded by nucleic acids as described herein (e.g., clustered regularly interspersed short palindromic repeats (CRISPR) transcripts, proteins, enzymes, mutant forms thereof, fusion proteins thereof, etc.). With regards to regulatory sequences, mention is made of U.S. patent application Ser. No. 10/491,026, the contents of which are incorporated by reference herein in their entirety. With regards to promoters, mention is made of PCT publication WO 2011/028929 and U.S. application Ser. No. 12/511,940, the contents of which are incorporated by reference herein in their entirety.

[0556] Advantageous vectors include lentiviruses and adeno-associated viruses, and types of such vectors can also be selected for targeting particular types of cells.

[0557] In particular embodiments, use is made of bicistronic vectors for the guide RNA and (optionally modified or mutated) the CRISPR-Cas protein fused to nucleotide deaminase. Bicistronic expression vectors for guide RNA and (optionally modified or mutated) CRISPR-Cas protein fused to nucleotide deaminase are preferred. In general and particularly in this embodiment, (optionally modified or mutated) CRISPR-Cas protein fused to nucleotide deaminase is preferably driven by the CBh promoter. The RNA may preferably be driven by a Pol III promoter, such as a U6 promoter. Ideally the two are combined.

[0558] Vectors can be designed for expression of CRISPR transcripts (e.g. nucleic acid transcripts, proteins, or enzymes) in prokaryotic or eukaryotic cells. For example, CRISPR transcripts can be expressed in bacterial cells such as Escherichia coli, insect cells (using baculovirus expression vectors), yeast cells, or mammalian cells. Suitable host cells are discussed further in Goeddel, GENE EXPRESSION TECHNOLOGY: METHODS IN ENZYMOLOGY 185, Academic Press, San Diego, Calif. (1990). Alternatively, the recombinant expression vector can be transcribed and translated in vitro, for example using T7 promoter regulatory sequences and T7 polymerase.

[0559] Vectors may be introduced and propagated in a prokaryote or prokaryotic cell. In some embodiments, a prokaryote is used to amplify copies of a vector to be introduced into a eukaryotic cell or as an intermediate vector in the production of a vector to be introduced into a eukaryotic cell (e.g. amplifying a plasmid as part of a viral vector packaging system). In some embodiments, a prokaryote is used to amplify copies of a vector and express one or more nucleic acids, such as to provide a source of one or more proteins for delivery to a host cell or host organism. Expression of proteins in prokaryotes is most often carried out in Escherichia coli with vectors containing constitutive or inducible promoters directing the expression of either fusion or non-fusion proteins. Fusion vectors add a number of amino acids to a protein encoded therein, such as to the amino terminus of the recombinant protein. Such fusion vectors may serve one or more purposes, such as: (i) to increase expression of recombinant protein; (ii) to increase the solubility of the recombinant protein; and (iii) to aid in the purification of the recombinant protein by acting as a ligand in affinity purification. Often, in fusion expression vectors, a proteolytic cleavage site is introduced at the junction of the fusion moiety and the recombinant protein to enable separation of the recombinant protein from the fusion moiety subsequent to purification of the fusion protein. Such enzymes, and their cognate recognition sequences, include Factor Xa, thrombin and enterokinase. Example fusion expression vectors include pGEX (Pharmacia Biotech Inc; Smith and Johnson, 1988. Gene 67: 31-40), pMAL (New England Biolabs, Beverly, Mass.) and pRIT5 (Pharmacia, Piscataway, N.J.) that fuse glutathione S-transferase (GST), maltose E binding protein, or protein A, respectively, to the target recombinant protein. Examples of suitable inducible non-fusion E. coli expression vectors include pTrc (Amrann et al., (1988) Gene 69:301-315) and pET 11d (Studier et al., GENE EXPRESSION TECHNOLOGY: METHODS IN ENZYMOLOGY 185, Academic Press, San Diego, Calif. (1990) 60-89). In some embodiments, a vector is a yeast expression vector. Examples of vectors for expression in yeast Saccharomyces cerivisae include pYepSec1 (Baldari, et al., 1987. EMBO J. 6: 229-234), pMFa (Kuijan and Herskowitz, 1982. Cell 30: 933-943), pJRY88 (Schultz et al., 1987. Gene 54: 113-123), pYES2 (Invitrogen Corporation, San Diego, Calif.), and picZ (InVitrogen Corp, San Diego, Calif.). In some embodiments, a vector drives protein expression in insect cells using baculovirus expression vectors. Baculovirus vectors available for expression of proteins in cultured insect cells (e.g., SF9 cells) include the pAc series (Smith, et al., 1983. Mol. Cell. Biol. 3: 2156-2165) and the pVL series (Lucklow and Summers, 1989. Virology 170: 31-39).

[0560] In some embodiments, a vector is capable of driving expression of one or more sequences in mammalian cells using a mammalian expression vector. Examples of mammalian expression vectors include pCDM8 (Seed, 1987. Nature 329: 840) and pMT2PC (Kaufman, et al., 1987. EMBO J. 6: 187-195). When used in mammalian cells, the expression vector's control functions are typically provided by one or more regulatory elements. For example, commonly used promoters are derived from polyoma, adenovirus 2, cytomegalovirus, simian virus 40, and others disclosed herein and known in the art. For other suitable expression systems for both prokaryotic and eukaryotic cells see, e.g., Chapters 16 and 17 of Sambrook, et al., MOLECULAR CLONING: A LABORATORY MANUAL. 2nd ed., Cold Spring Harbor Laboratory, Cold Spring Harbor Laboratory Press, Cold Spring Harbor, N.Y., 1989.

[0561] In some embodiments, the recombinant mammalian expression vector is capable of directing expression of the nucleic acid preferentially in a particular cell type (e.g., tissue-specific regulatory elements are used to express the nucleic acid). Tissue-specific regulatory elements are known in the art. Non-limiting examples of suitable tissue-specific promoters include the albumin promoter (liver-specific; Pinkert, et al., 1987. Genes Dev. 1: 268-277), lymphoid-specific promoters (Calame and Eaton, 1988. Adv. Immunol. 43: 235-275), in particular promoters of T cell receptors (Winoto and Baltimore, 1989. EMBO J. 8: 729-733) and immunoglobulins (Baneiji, et al., 1983. Cell 33: 729-740; Queen and Baltimore, 1983. Cell 33: 741-748), neuron-specific promoters (e.g., the neurofilament promoter; Byrne and Ruddle, 1989. Proc. Natl. Acad. Sci. USA 86: 5473-5477), pancreas-specific promoters (Edlund, et al., 1985. Science 230: 912-916), and mammary gland-specific promoters (e.g., milk whey promoter; U.S. Pat. No. 4,873,316 and European Application Publication No. 264,166). Developmentally-regulated promoters are also encompassed, e.g., the murine hox promoters (Kessel and Gruss, 1990. Science 249: 374-379) and the α-fetoprotein promoter (Campes and Tilghman, 1989. Genes Dev. 3: 537-546). With regards to these prokaryotic and eukaryotic vectors, mention is made of U.S. Pat. No. 6,750,059, the contents of which are incorporated by reference herein in their entirety. Other embodiments of the invention may relate to the use of viral vectors, with regards to which mention is made of U.S. patent application Ser. No. 13/092,085, the contents of which are incorporated by reference herein in their entirety. Tissue-specific regulatory elements are known in the art and in this regard, mention is made of U.S. Pat. No. 7,776,321, the contents of which are incorporated by reference herein in their entirety. In some embodiments, a regulatory element is operably linked to one or more elements of a CRISPR system so as to drive expression of the one or more elements of the CRISPR system.

[0562] In some embodiments, one or more vectors driving expression of one or more elements of a nucleic acid-targeting system are introduced into a host cell such that expression of the elements of the nucleic acid-targeting system direct formation of a nucleic acid-targeting complex at one or more target sites. For example, a nucleic acid-targeting effector enzyme and a nucleic acid-targeting guide RNA could each be operably linked to separate regulatory elements on separate vectors. RNA(s) of the nucleic acid-targeting system can be delivered to a transgenic nucleic acid-targeting effector protein animal or mammal, e.g., an animal or mammal that constitutively or inducibly or conditionally expresses nucleic acid-targeting effector protein; or an animal or mammal that is otherwise expressing nucleic acid-targeting effector proteins or has cells containing nucleic acid-targeting effector proteins, such as by way of prior administration thereto of a vector or vectors that code for and express in vivo nucleic acid-targeting effector proteins. Alternatively, two or more of the elements expressed from the same or different regulatory elements, may be combined in a single vector, with one or more additional vectors providing any components of the nucleic acid-targeting system not included in the first vector. nucleic acid-targeting system elements that are combined in a single vector may be arranged in any suitable orientation, such as one element located 5′ with respect to (“upstream” of) or 3′ with respect to (“downstream” of) a second element. The coding sequence of one element may be located on the same or opposite strand of the coding sequence of a second element, and oriented in the same or opposite direction. In some embodiments, a single promoter drives expression of a transcript encoding a nucleic acid-targeting effector protein and the nucleic acid-targeting guide RNA, embedded within one or more intron sequences (e.g., each in a different intron, two or more in at least one intron, or all in a single intron). In some embodiments, the nucleic acid-targeting effector protein and the nucleic acid-targeting guide RNA may be operably linked to and expressed from the same promoter. Delivery vehicles, vectors, particles, nanoparticles, formulations and components thereof for expression of one or more elements of a nucleic acid-targeting system are as used in the foregoing documents, such as WO 2014/093622 (PCT/US2013/074667). In some embodiments, a vector comprises one or more insertion sites, such as a restriction endonuclease recognition sequence (also referred to as a “cloning site”). In some embodiments, one or more insertion sites (e.g., about or more than about 1, 2, 3, 4, 5, 6, 7, 8, 9, 10, or more insertion sites) are located upstream and/or downstream of one or more sequence elements of one or more vectors. When multiple different guide sequences are used, a single expression construct may be used to target nucleic acid-targeting activity to multiple different, corresponding target sequences within a cell. For example, a single vector may comprise about or more than about 1, 2, 3, 4, 5, 6, 7, 8, 9, 10, 15, 20, or more guide sequences. In some embodiments, about or more than about 1, 2, 3, 4, 5, 6, 7, 8, 9, 10, or more such guide-sequence-containing vectors may be provided, and optionally delivered to a cell. In some embodiments, a vector comprises a regulatory element operably linked to an enzyme-coding sequence encoding a nucleic acid-targeting effector protein. Nucleic acid-targeting effector protein or nucleic acid-targeting guide RNA or RNA(s) can be delivered separately; and advantageously at least one of these is delivered via a particle complex. nucleic acid-targeting effector protein mRNA can be delivered prior to the nucleic acid-targeting guide RNA to give time for nucleic acid-targeting effector protein to be expressed. Nucleic acid-targeting effector protein mRNA might be administered 1-12 hours (preferably around 2-6 hours) prior to the administration of nucleic acid-targeting guide RNA. Alternatively, nucleic acid-targeting effector protein mRNA and nucleic acid-targeting guide RNA can be administered together. Advantageously, a second booster dose of guide RNA can be administered 1-12 hours (preferably around 2-6 hours) after the initial administration of nucleic acid-targeting effector protein mRNA +guide RNA. Additional administrations of nucleic acid-targeting effector protein mRNA and/or guide RNA might be useful to achieve the most efficient levels of genome modification.

### Dosage of Vectors

[0563] In some embodiments, the vector, e.g., plasmid or viral vector is delivered to the tissue of interest by, for example, an intramuscular injection, while other times the delivery is via intravenous, transdermal, intranasal, oral, mucosal, or other delivery methods. Such delivery may be either via a single dose, or multiple doses. One skilled in the art understands that the actual dosage to be delivered herein may vary greatly depending upon a variety of factors, such as the vector choice, the target cell, organism, or tissue, the general condition of the subject to be treated, the degree of transformation/modification sought, the administration route, the administration mode, the type of transformation/modification sought, etc.

[0564] Such a dosage may further contain, for example, a carrier (water, saline, ethanol, glycerol, lactose, sucrose, calcium phosphate, gelatin, dextran, agar, pectin, peanut oil, sesame oil, etc.), a diluent, a pharmaceutically-acceptable carrier (e.g., phosphate-buffered saline), a pharmaceutically-acceptable excipient, and/or other compounds known in the art. The dosage may further contain one or more pharmaceutically acceptable salts such as, for example, a mineral acid salt such as a hydrochloride, a hydrobromide, a phosphate, a sulfate, etc.; and the salts of organic acids such as acetates, propionates, malonates, benzoates, etc. Additionally, auxiliary substances, such as wetting or emulsifying agents, pH buffering substances, gels or gelling materials, flavorings, colorants, microspheres, polymers, suspension agents, etc. may also be present herein. In addition, one or more other conventional pharmaceutical ingredients, such as preservatives, humectants, suspending agents, surfactants, antioxidants, anticaking agents, fillers, chelating agents, coating agents, chemical stabilizers, etc. may also be present, especially if the dosage form is a reconstitute form. Suitable exemplary ingredients include microcrystalline cellulose, carboxymethylcellulose sodium, polysorbate 80, phenylethyl alcohol, chlorobutanol, potassium sorbate, sorbic acid, sulfur dioxide, propyl gallate, the parabens, ethyl vanillin, glycerin, phenol, parachlorophenol, gelatin, albumin and a combination thereof. A thorough discussion of pharmaceutically acceptable excipients is available in REMINGTON'S PHARMACEUTICAL SCIENCES (Mack Pub. Co., N.J. 1991) which is incorporated by reference herein.

[0565] In an embodiment herein the delivery is via an adenovirus, which may be at a single booster dose containing at least 1×10⁵ particles (also referred to as particle units, pu) of adenoviral vector. In an embodiment herein, the dose preferably is at least about 1×10⁶ particles (for example, about 1×10⁶-1×10¹² particles), more preferably at least about 1×10′ particles, more preferably at least about 1×10⁸ particles (e.g., about 1×10⁸-1×10¹¹ particles or about 1×10⁸-1×10¹² particles), and most preferably at least about 1×10⁹ particles (e.g., about 1×10⁹-1×10¹⁰ particles or about 1×10⁹-1×10¹² particles), or even at least about 1×10¹⁰ particles (e.g., about 1×10¹⁰-1×10¹² particles) of the adenoviral vector. Alternatively, the dose comprises no more than about 1×10¹⁴ particles, preferably no more than about 1×10¹³ particles, even more preferably no more than about 1×10¹² particles, even more preferably no more than about 1×10¹¹ particles, and most preferably no more than about 1×10¹⁰ particles (e.g., no more than about 1×10⁹ articles). Thus, the dose may contain a single dose of adenoviral vector with, for example, about 1×10⁶ particle units (pu), about 2×10⁶ pu, about 4×10⁶ pu, about 1×10⁷ pu, about 2×10⁷ pu, about 4×10⁷ pu, about 1×10⁸ pu, about 2×10⁸ pu, about 4×10⁸ pu, about 1×10⁹ pu, about 2×10⁹ pu, about 4×10⁹ pu, about 1×10¹⁰ pu, about 2×10¹⁰ pu, about 4×10¹⁰ pu, about 1×10¹¹ pu, about 2×10¹¹ pu, about 4×10¹¹ pu, about 1×10¹² pu, about 2×10¹² pu, or about 4×10¹² pu of adenoviral vector. See, for example, the adenoviral vectors in U.S. Pat. No. 8,454,972 B2 to Nabel, et. al., granted on Jun. 4, 2013; incorporated by reference herein, and the dosages at col 29, lines 36-58 thereof. In an embodiment herein, the adenovirus is delivered via multiple doses.

[0566] In an embodiment herein, the delivery is via an AAV. A therapeutically effective dosage for in vivo delivery of the AAV to a human is believed to be in the range of from about 20 to about 50 ml of saline solution containing from about 1×1010 to about 1×1010 functional AAV/ml solution. The dosage may be adjusted to balance the therapeutic benefit against any side effects. In an embodiment herein, the AAV dose is generally in the range of concentrations of from about 1×105 to 1×1050 genomes AAV, from about 1×108 to 1×1020 genomes AAV, from about 1×1010 to about 1×1016 genomes, or about 1×1011 to about 1×1016 genomes AAV. A human dosage may be about 1×1013 genomes AAV. Such concentrations may be delivered in from about 0.001 ml to about 100 ml, about 0.05 to about 50 ml, or about 10 to about 25 ml of a carrier solution. Other effective dosages can be readily established by one of ordinary skill in the art through routine trials establishing dose response curves. See, for example, U.S. Pat. No. 8,404,658 B2 to Hajjar, et al., granted on Mar. 26, 2013, at col. 27, lines 45-60.

[0567] In an embodiment herein the delivery is via a plasmid. In such plasmid compositions, the dosage should be a sufficient amount of plasmid to elicit a response. For instance, suitable quantities of plasmid DNA in plasmid compositions can be from about 0.1 to about 2 mg, or from about 1 μg to about 10 μg per 70 kg individual. Plasmids of the invention will generally comprise (i) a promoter; (ii) a sequence encoding a CRISPR-Cas protein, operably linked to said promoter; (iii) a selectable marker; (iv) an origin of replication; and (v) a transcription terminator downstream of and operably linked to (ii). The plasmid can also encode the RNA components of a CRISPR complex, but one or more of these may instead be encoded on a different vector.

[0568] The doses herein are based on an average 70 kg individual. The frequency of administration is within the ambit of the medical or veterinary practitioner (e.g., physician, veterinarian), or scientist skilled in the art. It is also noted that mice used in experiments are typically about 20 g and from mice experiments one can scale up to a 70 kg individual.

[0569] The dosage used for the compositions provided herein include dosages for repeated administration or repeat dosing. In particular embodiments, the administration is repeated within a period of several weeks, months, or years. Suitable assays can be performed to obtain an optimal dosage regime. Repeated administration can allow the use of lower dosage, which can positively affect off-target modifications.

### Example Delivery Systems

[0570] Conventional viral and non-viral based gene transfer methods can be used to introduce nucleic acids in mammalian cells or target tissues. Such methods can be used to administer nucleic acids encoding components of a nucleic acid-targeting system to cells in culture, or in a host organism. Non-viral vector delivery systems include DNA plasmids, RNA (e.g. a transcript of a vector described herein), naked nucleic acid, and nucleic acid complexed with a delivery vehicle, such as a liposome. Viral vector delivery systems include DNA and RNA viruses, which have either episomal or integrated genomes after delivery to the cell. For a review of gene therapy procedures, see Anderson, Science 256:808-813 (1992); Nabel & Felgner, TIBTECH 11:211-217 (1993); Mitani & Caskey, TIBTECH 11:162-166 (1993); Dillon, TIBTECH 11:167-175 (1993); Miller, Nature 357:455-460 (1992); Van Brunt, Biotechnology 6(10):1149-1154 (1988); Vigne, Restorative Neurology and Neuroscience 8:35-36 (1995); Kremer & Perricaudet, British Medical Bulletin 51(1):31-44 (1995); Haddada et al., in Current Topics in Microbiology and Immunology, Doerfler and Bohm (eds) (1995); and Yu et al., Gene Therapy 1:13-26 (1994).

[0571] Methods of non-viral delivery of nucleic acids include lipofection, nucleofection, microinjection, biolistics, virosomes, liposomes, immunoliposomes, polycation or lipid:nucleic acid conjugates, naked DNA, artificial virions, and agent-enhanced uptake of DNA. Lipofection is described in e.g., U.S. Pat. Nos. 5,049,386, 4,946,787; and 4,897,355) and lipofection reagents are sold commercially (e.g., Transfectam™ and Lipofectin™). Cationic and neutral lipids that are suitable for efficient receptor-recognition lipofection of polynucleotides include those of Felgner, WO 91/17424; WO 91/16024. Delivery can be to cells (e.g. in vitro or ex vivo administration) or target tissues (e.g. in vivo administration).

[0572] Plasmid delivery involves the cloning of a guide RNA into a CRISPR-Cas protein expressing plasmid and transfecting the DNA in cell culture. Plasmid backbones are available commercially and no specific equipment is required. They have the advantage of being modular, capable of carrying different sizes of CRISPR-Cas coding sequences (including those encoding larger sized proteins) as well as selection markers. Both an advantage of plasmids is that they can ensure transient, but sustained expression. However, delivery of plasmids is not straightforward such that in vivo efficiency is often low. The sustained expression can also be disadvantageous in that it can increase off-target editing. In addition excess build-up of the CRISPR-Cas protein can be toxic to the cells. Finally, plasmids always hold the risk of random integration of the dsDNA in the host genome, more particularly in view of the double-stranded breaks being generated (on and off-target).

[0573] The preparation of lipid:nucleic acid complexes, including targeted liposomes such as immunolipid complexes, is well known to one of skill in the art (see, e.g., Crystal, Science 270:404-410 (1995); Blaese et al., Cancer Gene Ther. 2:291-297 (1995); Behr et al., Bioconjugate Chem. 5:382-389 (1994); Remy et al., Bioconjugate Chem. 5:647-654 (1994); Gao et al., Gene Therapy 2:710-722 (1995); Ahmad et al., Cancer Res. 52:4817-4820 (1992); U.S. Pat. Nos. 4,186,183, 4,217,344, 4,235,871, 4,261,975, 4,485,054, 4,501,728, 4,774,085, 4,837,028, and 4,946,787). This is discussed more in detail below.

[0574] The use of RNA or DNA viral based systems for the delivery of nucleic acids takes advantage of highly evolved processes for targeting a virus to specific cells in the body and trafficking the viral payload to the nucleus. Viral vectors can be administered directly to patients (in vivo) or they can be used to treat cells in vitro, and the modified cells may optionally be administered to patients (ex vivo). Conventional viral based systems could include retroviral, lentivirus, adenoviral, adeno-associated and herpes simplex virus vectors for gene transfer. Integration in the host genome is possible with the retrovirus, lentivirus, and adeno-associated virus gene transfer methods, often resulting in long term expression of the inserted transgene. Additionally, high transduction efficiencies have been observed in many different cell types and target tissues.

[0575] The tropism of a retrovirus can be altered by incorporating foreign envelope proteins, expanding the potential target population of target cells. Lentiviral vectors are retroviral vectors that are able to transduce or infect non-dividing cells and typically produce high viral titers. Selection of a retroviral gene transfer system would therefore depend on the target tissue. Retroviral vectors are comprised of cis-acting long terminal repeats with packaging capacity for up to 6-10 kb of foreign sequence. The minimum cis-acting LTRs are sufficient for replication and packaging of the vectors, which are then used to integrate the therapeutic gene into the target cell to provide permanent transgene expression. Widely used retroviral vectors include those based upon murine leukemia virus (MuLV), gibbon ape leukemia virus (GaLV), Simian Immuno deficiency virus (SIV), human immuno deficiency virus (HIV), and combinations thereof (see, e.g., Buchscher et al., J. Virol. 66:2731-2739 (1992); Johann et al., J. Virol. 66:1635-1640 (1992); Sommnerfelt et al., Virol. 176:58-59 (1990); Wilson et al., J. Virol. 63:2374-2378 (1989); Miller et al., J. Virol. 65:2220-2224 (1991); PCT/US94/05700).

[0576] In applications where transient expression is preferred, adenoviral based systems may be used. Adenoviral based vectors are capable of very high transduction efficiency in many cell types and do not require cell division. With such vectors, high titer and levels of expression have been obtained. This vector can be produced in large quantities in a relatively simple system. Adeno-associated virus (“AAV”) vectors may also be used to transduce cells with target nucleic acids, e.g., in the in vitro production of nucleic acids and peptides, and for in vivo and ex vivo gene therapy procedures (see, e.g., West et al., Virology 160:38-47 (1987); U.S. Pat. No. 4,797,368; WO 93/24641; Kotin, Human Gene Therapy 5:793-801 (1994); Muzyczka, J. Clin. Invest. 94:1351 (1994). Construction of recombinant AAV vectors are described in a number of publications, including U.S. Pat. No. 5,173,414; Tratschin et al., Mol. Cell. Biol. 5:3251-3260 (1985); Tratschin, et al., Mol. Cell. Biol. 4:2072-2081 (1984); Hermonat & Muzyczka, PNAS 81:6466-6470 (1984); and Samulski et al., J. Virol. 63:03822-3828 (1989).

[0577] In some embodiments, the invention provides AAV that contains or consists essentially of an exogenous nucleic acid molecule encoding a CRISPR system, e.g., a plurality of cassettes comprising or consisting a first cassette comprising or consisting essentially of a promoter, a nucleic acid molecule encoding a CRISPR-associated (Cas) protein (putative nuclease or helicase proteins), e.g., Cas13 and a terminator, and one or more, advantageously up to the packaging size limit of the vector, e.g., in total (including the first cassette) five, cassettes comprising or consisting essentially of a promoter, nucleic acid molecule encoding guide RNA (gRNA) and a terminator (e.g., each cassette schematically represented as Promoter-gRNA1-terminator, Promoter-gRNA2-terminator . . . Promoter-gRNA(N)-terminator, where N is a number that can be inserted that is at an upper limit of the packaging size limit of the vector), or two or more individual rAAVs, each containing one or more than one cassette of a CRISPR system, e.g., a first rAAV containing the first cassette comprising or consisting essentially of a promoter, a nucleic acid molecule encoding Cas, e.g., Cas (Cas13) and a terminator, and a second rAAV containing one or more cassettes each comprising or consisting essentially of a promoter, nucleic acid molecule encoding guide RNA (gRNA) and a terminator (e.g., each cassette schematically represented as Promoter-gRNA1-terminator, Promoter-gRNA2-terminator Promoter-gRNA(N)-terminator, where N is a number that can be inserted that is at an upper limit of the packaging size limit of the vector). Alternatively, because Cas13 can process its own crRNA/gRNA, a single crRNA/gRNA array can be used for multiplex gene editing. Hence, instead of including multiple cassettes to deliver the gRNAs, the rAAV may contain a single cassette comprising or consisting essentially of a promoter, a plurality of crRNA/gRNA, and a terminator (e.g., schematically represented as Promoter-gRNA1-gRNA2 . . . gRNA(N)-terminator, where N is a number that can be inserted that is at an upper limit of the packaging size limit of the vector). See Zetsche et al Nature Biotechnology 35, 31-34 (2017), which is incorporated herein by reference in its entirety. As rAAV is a DNA virus, the nucleic acid molecules in the herein discussion concerning AAV or rAAV are advantageously DNA. The promoter is in some embodiments advantageously human Synapsin I promoter (hSyn). Additional methods for the delivery of nucleic acids to cells are known to those skilled in the art. See, for example, US20030087817, incorporated herein by reference.

[0578] In another embodiment, Cocal vesiculovirus envelope pseudotyped retroviral vector particles are contemplated (see, e.g., US Patent Publication No. 20120164118 assigned to the Fred Hutchinson Cancer Research Center). Cocal virus is in the Vesiculovirus genus, and is a causative agent of vesicular stomatitis in mammals. Cocal virus was originally isolated from mites in Trinidad (Jonkers et al., Am. J. Vet. Res. 25:236-242 (1964)), and infections have been identified in Trinidad, Brazil, and Argentina from insects, cattle, and horses. Many of the vesiculoviruses that infect mammals have been isolated from naturally infected arthropods, suggesting that they are vector-borne. Antibodies to vesiculoviruses are common among people living in rural areas where the viruses are endemic and laboratory-acquired; infections in humans usually result in influenza-like symptoms. The Cocal virus envelope glycoprotein shares 71.5% identity at the amino acid level with VSV-G Indiana, and phylogenetic comparison of the envelope gene of vesiculoviruses shows that Cocal virus is serologically distinct from, but most closely related to, VSV-G Indiana strains among the vesiculoviruses. Jonkers et al., Am. J. Vet. Res. 25:236-242 (1964) and Travassos da Rosa et al., Am. J. Tropical Med. & Hygiene 33:999-1006 (1984). The Cocal vesiculovirus envelope pseudotyped retroviral vector particles may include for example, lentiviral, alpharetroviral, betaretroviral, gammaretroviral, deltaretroviral, and epsilonretroviral vector particles that may comprise retroviral Gag, Pol, and/or one or more accessory protein(s) and a Cocal vesiculovirus envelope protein. Within certain aspects of these embodiments, the Gag, Pol, and accessory proteins are lentiviral and/or gammaretroviral.

[0579] In some embodiments, a host cell is transiently or non-transiently transfected with one or more vectors described herein. In some embodiments, a cell is transfected as it naturally occurs in a subject optionally to be reintroduced therein. In some embodiments, a cell that is transfected is taken from a subject. In some embodiments, the cell is derived from cells taken from a subject, such as a cell line. A wide variety of cell lines for tissue culture are known in the art. Examples of cell lines include, but are not limited to, C8161, CCRF-CEM, MOLT, mIMCD-3, NHDF, HeLa-S3, Huh1, Huh4, Huh7, HUVEC, HASMC, HEKn, HEKa, MiaPaCell, Pancl, PC-3, TF1, CTLL-2, C1R, Rath, CV1, RPTE, A10, T24, J82, A375, ARH-77, Calu1, SW480, SW620, SKOV3, SK-UT, CaCo2, P388D1, SEM-K2, WEHI-231, HB56, TIB55, Jurkat, J45.01, LRMB, Bcl-1, BC-3, IC21, DLD2, Raw264.7, NRK, NRK-52E, MRCS, MEF, Hep G2, HeLa B, HeLa T4, COS, COS-1, COS-6, COS-M6A, BS-C-1 monkey kidney epithelial, BALB/3T3 mouse embryo fibroblast, 3T3 Swiss, 3T3-L1, 132-d5 human fetal fibroblasts; 10.1 mouse fibroblasts, 293-T, 3T3, 721, 9L, A2780, A2780ADR, A2780cis, A172, A20, A253, A431, A-549, ALC, B16, B35, BCP-1 cells, BEAS-2B, bEnd.3, BHK-21, BR 293, BxPC3, C3H-10T1/2, C6/36, Cal-27, CHO, CHO-7, CHO-IR, CHO-K1, CHO-K2, CHO-T, CHO Dhfr −/−, COR-L23, COR-L23/CPR, COR-L23/5010, COR-L23/R23, COS-7, COV-434, CML T1, CMT, CT26, D17, DH82, DU145, DuCaP, EL4, EM2, EM3, EMT6/AR1, EMT6/AR10.0, FM3, H1299, H69, HB54, HB55, HCA2, HEK-293, HeLa, Hepa1c1c7, HL-60, HMEC, HT-29, Jurkat, JY cells, K562 cells, Ku812, KCL22, KG1, KYO1, LNCap, Ma-Mel 1-48, MC-38, MCF-7, MCF-10A, MDA-MB-231, MDA-MB-468, MDA-MB-435, MDCK II, MDCK II, MOR/0.2R, MONO-MAC 6, MTD-1A, MyEnd, NCI-H69/CPR, NCI-H69/LX10, NCI-H69/LX20, NCI-H69/LX4, NIH-3T3, NALM-1, NW-145, OPCN/OPCT cell lines, Peer, PNT-1A/PNT 2, RenCa, RIN-5F, RMA/RMAS, Saos-2 cells, Sf-9, SkBr3, T2, T-47D, T84, THP1 cell line, U373, U87, U937, VCaP, Vero cells, WM39, WT-49, X63, YAC-1, YAR, and transgenic varieties thereof. Cell lines are available from a variety of sources known to those with skill in the art (see, e.g., the American Type Culture Collection (ATCC) (Manassas, Va.)).

[0580] In particular embodiments, transient expression and/or presence of one or more of the components of the AD-functionalized CRISPR system can be of interest, such as to reduce off-target effects. In some embodiments, a cell transfected with one or more vectors described herein is used to establish a new cell line comprising one or more vector-derived sequences. In some embodiments, a cell transiently transfected with the components of an AD-functionalized CRISPR system as described herein (such as by transient transfection of one or more vectors, or transfection with RNA), and modified through the activity of a CRISPR complex, is used to establish a new cell line comprising cells containing the modification but lacking any other exogenous sequence. In some embodiments, cells transiently or non-transiently transfected with one or more vectors described herein, or cell lines derived from such cells are used in assessing one or more test compounds.

[0581] In some embodiments it is envisaged to introduce the RNA and/or protein directly to the host cell. For instance, the CRISPR-Cas protein can be delivered as encoding mRNA together with an in vitro transcribed guide RNA. Such methods can reduce the time to ensure effect of the CRISPR-Cas protein and further prevents long-term expression of the CRISPR system components.

[0582] In some embodiments the RNA molecules of the invention are delivered in liposome or lipofectin formulations and the like and can be prepared by methods well known to those skilled in the art. Such methods are described, for example, in U.S. Pat. Nos. 5,593,972, 5,589,466, and 5,580,859, which are herein incorporated by reference. Delivery systems aimed specifically at the enhanced and improved delivery of siRNA into mammalian cells have been developed, (see, for example, Shen et al FEBS Let. 2003, 539:111-114; Xia et al., Nat. Biotech. 2002, 20:1006-1010; Reich et al., Mol. Vision. 2003, 9: 210-216; Sorensen et al., J. Mol. Biol. 2003, 327: 761-766; Lewis et al., Nat. Gen. 2002, 32: 107-108 and Simeoni et al., NAR 2003, 31, 11: 2717-2724) and may be applied to the present invention. siRNA has recently been successfully used for inhibition of gene expression in primates (see for example. Tolentino et al., Retina 24(4):660 which may also be applied to the present invention.

[0583] Indeed, RNA delivery is a useful method of in vivo delivery. It is possible to deliver Cas13, nucleotide deaminase, and guide RNA into cells using liposomes or nanoparticles. Thus delivery of the CRISPR-Cas protein, such as a Cas13, the delivery of the nucleotide deaminase (which may be fused to the CRISPR-Cas protein or an adaptor protein), and/or delivery of the RNAs of the invention may be in RNA form and via microvesicles, liposomes or particle or particles. For example, Cas13 mRNA, nucleotide deaminase mRNA, and guide RNA can be packaged into liposomal particles for delivery in vivo. Liposomal transfection reagents such as lipofectamine from Life Technologies and other reagents on the market can effectively deliver RNA molecules into the liver.

[0584] Means of delivery of RNA also preferred include delivery of RNA via particles (Cho, S., Goldberg, M., Son, S., Xu, Q., Yang, F., Mei, Y., Bogatyrev, S., Langer, R. and Anderson, D., Lipid-like nanoparticles for small interfering RNA delivery to endothelial cells, Advanced Functional Materials, 19: 3112-3118, 2010) or exosomes (Schroeder, A., Levins, C., Cortez, C., Langer, R., and Anderson, D., Lipid-based nanotherapeutics for siRNA delivery, Journal of Internal Medicine, 267: 9-21, 2010, PMID: 20059641). Indeed, exosomes have been shown to be particularly useful in delivery siRNA, a system with some parallels to the CRISPR system. For instance, El-Andaloussi S, et al. (“Exosome-mediated delivery of siRNA in vitro and in vivo.” Nat Protoc. 2012 December; 7(12):2112-26. doi: 10.1038/nprot.2012.131. Epub 2012 Nov. 15.) describe how exosomes are promising tools for drug delivery across different biological barriers and can be harnessed for delivery of siRNA in vitro and in vivo. Their approach is to generate targeted exosomes through transfection of an expression vector, comprising an exosomal protein fused with a peptide ligand. The exosomes are then purify and characterized from transfected cell supernatant, then RNA is loaded into the exosomes. Delivery or administration according to the invention can be performed with exosomes, in particular but not limited to the brain. Vitamin E (α-tocopherol) may be conjugated with CRISPR Cas and delivered to the brain along with high density lipoprotein (HDL), for example in a similar manner as was done by Uno et al. (HUMAN GENE THERAPY 22:711-719 (June 2011)) for delivering short-interfering RNA (siRNA) to the brain. Mice were infused via Osmotic minipumps (model 1007D; Alzet, Cupertino, Calif.) filled with phosphate-buffered saline (PBS) or free TocsiBACE or Toc-siBACE/HDL and connected with Brain Infusion Kit 3 (Alzet). A brain-infusion cannula was placed about 0.5 mm posterior to the bregma at midline for infusion into the dorsal third ventricle. Uno et al. found that as little as 3 nmol of Toc-siRNA with HDL could induce a target reduction in comparable degree by the same ICV infusion method. A similar dosage of CRISPR Cas conjugated to α-tocopherol and co-administered with HDL targeted to the brain may be contemplated for humans in the present invention, for example, about 3 nmol to about 3 μmol of CRISPR Cas targeted to the brain may be contemplated. Zou et al. ((HUMAN GENE THERAPY 22:465-475 (April 2011)) describes a method of lentiviral-mediated delivery of short-hairpin RNAs targeting PKCγ for in vivo gene silencing in the spinal cord of rats. Zou et al. administered about 10 μl of a recombinant lentivirus having a titer of 1×109 transducing units (TU)/ml by an intrathecal catheter. A similar dosage of CRISPR Cas expressed in a lentiviral vector targeted to the brain may be contemplated for humans in the present invention, for example, about 10-50 ml of CRISPR Cas targeted to the brain in a lentivirus having a titer of 1×10⁹ transducing units (TU)/ml may be contemplated.

### RNA Delivery

[0585] In particular embodiments, RNA based delivery is used. In these embodiments, mRNA of the CRISPR-Cas protein, mRNA of the nucleotide deaminase (which may be fused to a CRISPR-Cas protein or an adaptor), are delivered together with in vitro transcribed guide RNA. Liang et al. describes efficient genome editing using RNA based delivery (Protein Cell. 2015 May; 6(5): 363-372). In some embodiments, the mRNA(s) encoding Cas13 and/or nucleotide deaminase can be chemically modified, which may lead to improved activity compared to plasmid-encoded Cas13 and/or nucleotide deaminase. For example, uridines in the mRNA(s) can be partially or fully substituted with pseudouridine (Ψ), N1-methylpseudouridine (me1Ψ), 5-methoxyuridine(5moU). See Li et al., Nature Biomedical Engineering 1, 0066 DOI:10.1038/s41551-017-0066 (2017), which is incorporated herein by reference in its entirety.

### RNP Delivery

[0586] In particular embodiments, pre-complexed guide RNA, CRISPR-Cas protein, and nucleotide deaminase (which may be fused to a CRISPR-Cas protein or an adaptor) are delivered as a ribonucleoprotein (RNP). RNPs have the advantage that they lead to rapid editing effects even more so than the RNA method because this process avoids the need for transcription. An important advantage is that both RNP delivery is transient, reducing off-target effects and toxicity issues. Efficient genome editing in different cell types has been observed by Kim et al. (2014, Genome Res. 24(6):1012-9), Paix et al. (2015, Genetics 204(1):47-54), Chu et al. (2016, BMC Biotechnol. 16:4), and Wang et al. (2013, Cell. 9; 153(4):910-8).

[0587] In particular embodiments, the ribonucleoprotein is delivered by way of a polypeptide-based shuttle agent as described in WO2016161516. WO2016161516 describes efficient transduction of polypeptide cargos using synthetic peptides comprising an endosome leakage domain (ELD) operably linked to a cell penetrating domain (CPD), to a histidine-rich domain and a CPD. Similarly these polypeptides can be used for the delivery of CRISPR-effector based RNPs in eukaryotic cells.

### Particles

[0588] In some aspects or embodiments, a composition comprising a delivery particle formulation may be used. In some aspects or embodiments, the formulation comprises a CRISPR complex, the complex comprising a CRISPR protein and a guide which directs sequence-specific binding of the CRISPR complex to a target sequence. In some embodiments, the delivery particle comprises a lipid-based particle, optionally a lipid nanoparticle, or cationic lipid and optionally biodegradable polymer. In some embodiments, the cationic lipid comprises 1,2-dioleoyl-3-trimethylammonium-propane (DOTAP). In some embodiments, the hydrophilic polymer comprises ethylene glycol or polyethylene glycol. In some embodiments, the delivery particle further comprises a lipoprotein, preferably cholesterol. In some embodiments, the delivery particles are less than 500 nm in diameter, optionally less than 250 nm in diameter, optionally less than 100 nm in diameter, optionally about 35 nm to about 60 nm in diameter.

[0589] Example particle delivery complexes are further disclosed in U.S. Provisional Application entitled “Nove Delivery of Large Payloads” filed 62/485,625 filed Apr. 14, 2017.

[0590] Several types of particle delivery systems and/or formulations are known to be useful in a diverse spectrum of biomedical applications. In general, a particle is defined as a small object that behaves as a whole unit with respect to its transport and properties. Particles are further classified according to diameter. Coarse particles cover a range between 2,500 and 10,000 nanometers. Fine particles are sized between 100 and 2,500 nanometers. Ultrafine particles, or nanoparticles, are generally between 1 and 100 nanometers in size. The basis of the 100-nm limit is the fact that novel properties that differentiate particles from the bulk material typically develop at a critical length scale of under 100 nm.

[0591] As used herein, a particle delivery system/formulation is defined as any biological delivery system/formulation which includes a particle in accordance with the present invention. A particle in accordance with the present invention is any entity having a greatest dimension (e.g. diameter) of less than 100 microns (μm). In some embodiments, inventive particles have a greatest dimension of less than 10 μm. In some embodiments, inventive particles have a greatest dimension of less than 2000 nanometers (nm). In some embodiments, inventive particles have a greatest dimension of less than 1000 nanometers (nm). In some embodiments, inventive particles have a greatest dimension of less than 900 nm, 800 nm, 700 nm, 600 nm, 500 nm, 400 nm, 300 nm, 200 nm, or 100 nm. Typically, inventive particles have a greatest dimension (e.g., diameter) of 500 nm or less. In some embodiments, inventive particles have a greatest dimension (e.g., diameter) of 250 nm or less. In some embodiments, inventive particles have a greatest dimension (e.g., diameter) of 200 nm or less. In some embodiments, inventive particles have a greatest dimension (e.g., diameter) of 150 nm or less. In some embodiments, inventive particles have a greatest dimension (e.g., diameter) of 100 nm or less. Smaller particles, e.g., having a greatest dimension of 50 nm or less are used in some embodiments of the invention. In some embodiments, inventive particles have a greatest dimension ranging between 25 nm and 200 nm.

[0592] In terms of this invention, it is preferred to have one or more components of CRISPR complex, e.g., CRISPR-Cas protein or mRNA, or nucleotide deaminase (which may be fused to a CRISPR-Cas protein or an adaptor) or mRNA, or guide RNA delivered using nanoparticles or lipid envelopes. Other delivery systems or vectors are may be used in conjunction with the nanoparticle aspects of the invention.

[0593] In general, a “nanoparticle” refers to any particle having a diameter of less than 1000 nm. In certain preferred embodiments, nanoparticles of the invention have a greatest dimension (e.g., diameter) of 500 nm or less. In other preferred embodiments, nanoparticles of the invention have a greatest dimension ranging between 25 nm and 200 nm. In other preferred embodiments, nanoparticles of the invention have a greatest dimension of 100 nm or less. In other preferred embodiments, nanoparticles of the invention have a greatest dimension ranging between 35 nm and 60 nm. It will be appreciated that reference made herein to particles or nanoparticles can be interchangeable, where appropriate.

[0594] It will be understood that the size of the particle will differ depending as to whether it is measured before or after loading. Accordingly, in particular embodiments, the term “nanoparticles” may apply only to the particles pre loading.

[0595] Nanoparticles encompassed in the present invention may be provided in different forms, e.g., as solid nanoparticles (e.g., metal such as silver, gold, iron, titanium), non-metal, lipid-based solids, polymers), suspensions of nanoparticles, or combinations thereof. Metal, dielectric, and semiconductor nanoparticles may be prepared, as well as hybrid structures (e.g., core-shell nanoparticles). Nanoparticles made of semiconducting material may also be labeled quantum dots if they are small enough (typically sub 10 nm) that quantization of electronic energy levels occurs. Such nanoscale particles are used in biomedical applications as drug carriers or imaging agents and may be adapted for similar purposes in the present invention.

[0596] Semi-solid and soft nanoparticles have been manufactured, and are within the scope of the present invention. A prototype nanoparticle of semi-solid nature is the liposome. Various types of liposome nanoparticles are currently used clinically as delivery systems for anticancer drugs and vaccines. Nanoparticles with one half hydrophilic and the other half hydrophobic are termed Janus particles and are particularly effective for stabilizing emulsions. They can self-assemble at water/oil interfaces and act as solid surfactants.

[0597] Particle characterization (including e.g., characterizing morphology, dimension, etc.) is done using a variety of different techniques. Common techniques are electron microscopy (TEM, SEM), atomic force microscopy (AFM), dynamic light scattering (DLS), X-ray photoelectron spectroscopy (XPS), powder X-ray diffraction (XRD), Fourier transform infrared spectroscopy (FTIR), matrix-assisted laser desorption/ionization time-of-flight mass spectrometry(MALDI-TOF), ultraviolet-visible spectroscopy, dual polarization interferometry and nuclear magnetic resonance (NMR). Characterization (dimension measurements) may be made as to native particles (i.e., preloading) or after loading of the cargo (herein cargo refers to e.g., one or more components of CRISPR-Cas system e.g., CRISPR-Cas protein or mRNA, nucleotide deaminase (which may be fused to a CRISPR-Cas protein or an adaptor) or mRNA, or guide RNA, or any combination thereof, and may include additional carriers and/or excipients) to provide particles of an optimal size for delivery for any in vitro, ex vivo and/or in vivo application of the present invention. In certain preferred embodiments, particle dimension (e.g., diameter) characterization is based on measurements using dynamic laser scattering (DLS). Mention is made of U.S. Pat. Nos. 8,709,843; 6,007,845; 5,855,913; 5,985,309; 5,543,158; and the publication by James E. Dahlman and Carmen Barnes et al. Nature Nanotechnology (2014) published online 11 May 2014, doi:10.1038/nnano.2014.84, concerning particles, methods of making and using them and measurements thereof.

[0598] Particles delivery systems within the scope of the present invention may be provided in any form, including but not limited to solid, semi-solid, emulsion, or colloidal particles. As such any of the delivery systems described herein, including but not limited to, e.g., lipid-based systems, liposomes, micelles, microvesicles, exosomes, or gene gun may be provided as particle delivery systems within the scope of the present invention.

[0599] CRISPR-Cas protein mRNA, nucleotide deaminase (which may be fused to a CRISPR-Cas protein or an adaptor) or mRNA, and guide RNA may be delivered simultaneously using particles or lipid envelopes; for instance, CRISPR-Cas protein and RNA of the invention, e.g., as a complex, can be delivered via a particle as in Dahlman et al., WO2015089419 A2 and documents cited therein, such as 7C1 (see, e.g., James E. Dahlman and Carmen Barnes et al. Nature Nanotechnology (2014) published online 11 May 2014, doi:10.1038/nnano.2014.84), e.g., delivery particle comprising lipid or lipidoid and hydrophilic polymer, e.g., cationic lipid and hydrophilic polymer, for instance wherein the cationic lipid comprises 1,2-dioleoyl-3-trimethylammonium-propane (DOTAP) or 1,2-ditetradecanoyl-sn-glycero-3-phosphocholine (DMPC) and/or wherein the hydrophilic polymer comprises ethylene glycol or polyethylene glycol (PEG); and/or wherein the particle further comprises cholesterol (e.g., particle from formulation 1=DOTAP 100, DMPC 0, PEG 0, Cholesterol 0; formulation number 2=DOTAP 90, DMPC 0, PEG 10, Cholesterol 0; formulation number 3=DOTAP 90, DMPC 0, PEG 5, Cholesterol 5), wherein particles are formed using an efficient, multistep process wherein first, effector protein and RNA are mixed together, e.g., at a 1:1 molar ratio, e.g., at room temperature, e.g., for 30 minutes, e.g., in sterile, nuclease free 1×PBS; and separately, DOTAP, DMPC, PEG, and cholesterol as applicable for the formulation are dissolved in alcohol, e.g., 100% ethanol; and, the two solutions are mixed together to form particles containing the complexes).

[0600] Nucleic acid-targeting effector proteins (e.g., a Type V protein such as Cas13) mRNA and guide RNA may be delivered simultaneously using particles or lipid envelopes. Examples of suitable particles include but are not limited to those described in U.S. Pat. No. 9,301,923.

[0601] For example, Su X, Fricke J, Kavanagh D G, Irvine D J (“In vitro and in vivo mRNA delivery using lipid-enveloped pH-responsive polymer nanoparticles” Mol Pharm. 2011 Jun. 6; 8(3):774-87. doi: 10.1021/mp100390w. Epub 2011 Apr. 1) describes biodegradable core-shell structured nanoparticles with a poly(β-amino ester) (PBAE) core enveloped by a phospholipid bilayer shell. These were developed for in vivo mRNA delivery. The pH-responsive PBAE component was chosen to promote endosome disruption, while the lipid surface layer was selected to minimize toxicity of the polycation core. Such are, therefore, preferred for delivering RNA of the present invention.

[0602] In one embodiment, particles/nanoparticles based on self assembling bioadhesive polymers are contemplated, which may be applied to oral delivery of peptides, intravenous delivery of peptides and nasal delivery of peptides, all to the brain. Other embodiments, such as oral absorption and ocular delivery of hydrophobic drugs are also contemplated. The molecular envelope technology involves an engineered polymer envelope which is protected and delivered to the site of the disease (see, e.g., Mazza, M. et al. ACSNano, 2013. 7(2): 1016-1026; Siew, A., et al. Mol Pharm, 2012. 9(1):14-28; Lalatsa, A., et al. J Contr Rel, 2012. 161(2):523-36; Lalatsa, A., et al., Mol Pharm, 2012. 9(6):1665-80; Lalatsa, A., et al. Mol Pharm, 2012. 9(6):1764-74; Garrett, N. L., et al. J Biophotonics, 2012. 5(5-6):458-68; Garrett, N. L., et al. J Raman Spect, 2012. 43(5):681-688; Ahmad, S., et al. J Royal Soc Interface 2010. 7:S423-33; Uchegbu, I.F. Expert Opin Drug Deliv, 2006. 3(5):629-40; Qu, X., et al. Biomacromolecules, 2006. 7(12):3452-9 and Uchegbu, I. F., et al. Int J Pharm, 2001. 224:185-199). Doses of about 5 mg/kg are contemplated, with single or multiple doses, depending on the target tissue.

[0603] In one embodiment, particles/nanoparticles that can deliver RNA to a cancer cell to stop tumor growth developed by Dan Anderson's lab at MIT may be used/and or adapted to the AD-functionalized CRISPR-Cas system of the present invention. In particular, the Anderson lab developed fully automated, combinatorial systems for the synthesis, purification, characterization, and formulation of new biomaterials and nanoformulations. See, e.g., Alabi et al., Proc Natl Acad Sci USA. 2013 Aug. 6; 110(32):12881-6; Zhang et al., Adv Mater. 2013 Sep. 6; 25(33):4641-5; Jiang et al., Nano Lett. 2013 Mar. 13; 13(3):1059-64; Karagiannis et al., ACS Nano. 2012 Oct. 23; 6(10):8484-7; Whitehead et al., ACS Nano. 2012 Aug. 28; 6(8):6922-9 and Lee et al., Nat Nanotechnol. 2012 Jun. 3; 7(6):389-93.

[0604] US patent application 20110293703 relates to lipidoid compounds are also particularly useful in the administration of polynucleotides, which may be applied to deliver the AD-functionalized CRISPR-Cas system of the present invention. In one aspect, the aminoalcohol lipidoid compounds are combined with an agent to be delivered to a cell or a subject to form microparticles, nanoparticles, liposomes, or micelles. The agent to be delivered by the particles, liposomes, or micelles may be in the form of a gas, liquid, or solid, and the agent may be a polynucleotide, protein, peptide, or small molecule. The aminoalcohol lipidoid compounds may be combined with other aminoalcohol lipidoid compounds, polymers (synthetic or natural), surfactants, cholesterol, carbohydrates, proteins, lipids, etc. to form the particles. These particles may then optionally be combined with a pharmaceutical excipient to form a pharmaceutical composition.

[0605] US Patent Publication No. 20110293703 also provides methods of preparing the aminoalcohol lipidoid compounds. One or more equivalents of an amine are allowed to react with one or more equivalents of an epoxide-terminated compound under suitable conditions to form an aminoalcohol lipidoid compound of the present invention. In certain embodiments, all the amino groups of the amine are fully reacted with the epoxide-terminated compound to form tertiary amines. In other embodiments, all the amino groups of the amine are not fully reacted with the epoxide-terminated compound to form tertiary amines thereby resulting in primary or secondary amines in the aminoalcohol lipidoid compound. These primary or secondary amines are left as is or may be reacted with another electrophile such as a different epoxide-terminated compound. As will be appreciated by one skilled in the art, reacting an amine with less than excess of epoxide-terminated compound will result in a plurality of different aminoalcohol lipidoid compounds with various numbers of tails. Certain amines may be fully functionalized with two epoxide-derived compound tails while other molecules will not be completely functionalized with epoxide-derived compound tails. For example, a diamine or polyamine may include one, two, three, or four epoxide-derived compound tails off the various amino moieties of the molecule resulting in primary, secondary, and tertiary amines. In certain embodiments, all the amino groups are not fully functionalized. In certain embodiments, two of the same types of epoxide-terminated compounds are used. In other embodiments, two or more different epoxide-terminated compounds are used. The synthesis of the aminoalcohol lipidoid compounds is performed with or without solvent, and the synthesis may be performed at higher temperatures ranging from 30-100° C., preferably at approximately 50-90° C. The prepared aminoalcohol lipidoid compounds may be optionally purified. For example, the mixture of aminoalcohol lipidoid compounds may be purified to yield an aminoalcohol lipidoid compound with a particular number of epoxide-derived compound tails. Or the mixture may be purified to yield a particular stereo- or regioisomer. The aminoalcohol lipidoid compounds may also be alkylated using an alkyl halide (e.g., methyl iodide) or other alkylating agent, and/or they may be acylated.

[0606] US Patent Publication No. 20110293703 also provides libraries of aminoalcohol lipidoid compounds prepared by the inventive methods. These aminoalcohol lipidoid compounds may be prepared and/or screened using high-throughput techniques involving liquid handlers, robots, microtiter plates, computers, etc. In certain embodiments, the aminoalcohol lipidoid compounds are screened for their ability to transfect polynucleotides or other agents (e.g., proteins, peptides, small molecules) into the cell.

[0607] US Patent Publication No. 20130302401 relates to a class of poly(beta-amino alcohols) (PBAAs) has been prepared using combinatorial polymerization. The inventive PBAAs may be used in biotechnology and biomedical applications as coatings (such as coatings of films or multilayer films for medical devices or implants), additives, materials, excipients, non-biofouling agents, micropatterning agents, and cellular encapsulation agents. When used as surface coatings, these PBAAs elicited different levels of inflammation, both in vitro and in vivo, depending on their chemical structures. The large chemical diversity of this class of materials allowed us to identify polymer coatings that inhibit macrophage activation in vitro. Furthermore, these coatings reduce the recruitment of inflammatory cells, and reduce fibrosis, following the subcutaneous implantation of carboxylated polystyrene microparticles. These polymers may be used to form polyelectrolyte complex capsules for cell encapsulation. The invention may also have many other biological applications such as antimicrobial coatings, DNA or siRNA delivery, and stem cell tissue engineering. The teachings of US Patent Publication No. 20130302401 may be applied to the AD-functionalized CRISPR-Cas system of the present invention.

[0608] Preassembled recombinant CRISPR-Cas complexes comprising Cas13, nucleotide deaminase (which may be fused to Cas13 or an adaptor protein), and guide RNA may be transfected, for example by electroporation, resulting in high mutation rates and absence of detectable off-target mutations. Hur, J. K. et al, Targeted mutagenesis in mice by electroporation of Cas13 ribonucleoproteins, Nat Biotechnol. 2016 Jun. 6. doi: 10.1038/nbt.3596.

[0609] In terms of local delivery to the brain, this can be achieved in various ways. For instance, material can be delivered intrastriatally e.g. by injection. Injection can be performed stereotactically via a craniotomy.

[0610] In some embodiments, sugar-based particles may be used, for example GalNAc, as described herein and with reference to WO2014118272 (incorporated herein by reference) and Nair, J K et al., 2014, Journal of the American Chemical Society 136 (49), 16958-16961) and the teaching herein, especially in respect of delivery applies to all particles unless otherwise apparent. This may be considered to be a sugar-based particle and further details on other particle delivery systems and/or formulations are provided herein. GalNAc can therefore be considered to be a particle in the sense of the other particles described herein, such that general uses and other considerations, for instance delivery of said particles, apply to GalNAc particles as well. A solution-phase conjugation strategy may for example be used to attach triantennary GalNAc clusters (mol. wt. ˜2000) activated as PFP (pentafluorophenyl) esters onto 5′-hexylamino modified oligonucleotides (5′-HA ASOs, mol. wt. ˜8000 Da; Østergaard et al., Bioconjugate Chem., 2015, 26 (8), pp 1451-1455). Similarly, poly(acrylate) polymers have been described for in vivo nucleic acid delivery (see WO2013158141 incorporated herein by reference). In further alternative embodiments, pre-mixing CRISPR nanoparticles (or protein complexes) with naturally occurring serum proteins may be used in order to improve delivery (Akinc A et al, 2010, Molecular Therapy vol. 18 no. 7, 1357-1364).

### Nanoclews

[0611] Further, the AD-functionalized CRISPR system may be delivered using nanoclews, for example as described in Sun W et al, Cocoon-like self-degradable DNA nanoclew for anticancer drug delivery., J Am Chem Soc. 2014 Oct. 22; 136(42):14722-5. doi: 10.1021/ja5088024. Epub 2014 Oct. 13.; or in Sun W et al, Self-Assembled DNA Nanoclews for the Efficient Delivery of CRISPR-Cas9 for Genome Editing., Angew Chem Int Ed Engl. 2015 Oct. 5; 54(41):12029-33. doi: 10.1002/anie.201506030. Epub 2015 Aug. 27.

### LNP

[0612] In some embodiments, delivery is by encapsulation of the Cas13 protein or mRNA form in a lipid particle such as an LNP. In some embodiments, therefore, lipid nanoparticles (LNPs) are contemplated. An antitransthyretin small interfering RNA has been encapsulated in lipid nanoparticles and delivered to humans (see, e.g., Coelho et al., N Engl J Med 2013; 369:819-29), and such a system may be adapted and applied to the CRISPR Cas system of the present invention. Doses of about 0.01 to about 1 mg per kg of body weight administered intravenously are contemplated. Medications to reduce the risk of infusion-related reactions are contemplated, such as dexamethasone, acetampinophen, diphenhydramine or cetirizine, and ranitidine are contemplated. Multiple doses of about 0.3 mg per kilogram every 4 weeks for five doses are also contemplated.

[0613] LNPs have been shown to be highly effective in delivering siRNAs to the liver (see, e.g., Tabernero et al., Cancer Discovery, April 2013, Vol. 3, No. 4, pages 363-470) and are therefore contemplated for delivering RNA encoding CRISPR Cas to the liver. A dosage of about four doses of 6 mg/kg of the LNP every two weeks may be contemplated. Tabernero et al. demonstrated that tumor regression was observed after the first 2 cycles of LNPs dosed at 0.7 mg/kg, and by the end of 6 cycles the patient had achieved a partial response with complete regression of the lymph node metastasis and substantial shrinkage of the liver tumors. A complete response was obtained after 40 doses in this patient, who has remained in remission and completed treatment after receiving doses over 26 months. Two patients with RCC and extrahepatic sites of disease including kidney, lung, and lymph nodes that were progressing following prior therapy with VEGF pathway inhibitors had stable disease at all sites for approximately 8 to 12 months, and a patient with PNET and liver metastases continued on the extension study for 18 months (36 doses) with stable disease.

[0614] However, the charge of the LNP must be taken into consideration. As cationic lipids combined with negatively charged lipids to induce nonbilayer structures that facilitate intracellular delivery. Because charged LNPs are rapidly cleared from circulation following intravenous injection, ionizable cationic lipids with pKa values below 7 were developed (see, e.g., Rosin et al, Molecular Therapy, vol. 19, no. 12, pages 1286-2200, December 2011). Negatively charged polymers such as RNA may be loaded into LNPs at low pH values (e.g., pH 4) where the ionizable lipids display a positive charge. However, at physiological pH values, the LNPs exhibit a low surface charge compatible with longer circulation times. Four species of ionizable cationic lipids have been focused upon, namely 1,2-dilineoyl-3-dimethylammonium-propane (DLinDAP), 1,2-dilinoleyloxy-3-N,N-dimethylaminopropane (DLinDMA), 1,2-dilinoleyloxy-keto-N,N-dimethyl-3-aminopropane (DLinKDMA), and 1,2-dilinoleyl-4-(2-dimethylaminoethyl)[1,3]-dioxolane (DLinKC2-DMA). It has been shown that LNP siRNA systems containing these lipids exhibit remarkably different gene silencing properties in hepatocytes in vivo, with potencies varying according to the series DLinKC2-DMA>DLinKDMA>DLinDMA>>DLinDAP employing a Factor VII gene silencing model (see, e.g., Rosin et al, Molecular Therapy, vol. 19, no. 12, pages 1286-2200, December 2011). A dosage of 1 μg/ml of LNP or CRISPR-Cas RNA in or associated with the LNP may be contemplated, especially for a formulation containing DLinKC2-DMA.

[0615] Preparation of LNPs and CRISPR Cas encapsulation may be used/and or adapted from Rosin et al, Molecular Therapy, vol. 19, no. 12, pages 1286-2200, December 2011). The cationic lipids 1,2-dilineoyl-3-dimethylammonium-propane (DLinDAP), 1,2-dilinoleyloxy-3-N,N-dimethylaminopropane (DLinDMA), 1,2-dilinoleyloxyketo-N,N-dimethyl-3-aminopropane (DLinK-DMA), 1,2-dilinoleyl-4-(2-dimethylaminoethyl)[1,3]-dioxolane (DLinKC2-DMA), (3-o-[2″-(methoxypolyethyleneglycol 2000) succinoyl]-1,2-dimyristoyl-sn-glycol (PEG-S-DMG), and R-3-[(ω-methoxy-poly(ethylene glycol)2000) carbamoyl]-1,2-dimyristyloxlpropyl-3-amine (PEG-C-DOMG) may be provided by Tekmira Pharmaceuticals (Vancouver, Canada) or synthesized. Cholesterol may be purchased from Sigma (St Louis, Mo.). The specific CRISPR Cas RNA may be encapsulated in LNPs containing DLinDAP, DLinDMA, DLinK-DMA, and DLinKC2-DMA (cationic lipid:DSPC:CHOL: PEGS-DMG or PEG-C-DOMG at 40:10:40:10 molar ratios). When required, 0.2% SP-DiOC18 (Invitrogen, Burlington, Canada) may be incorporated to assess cellular uptake, intracellular delivery, and biodistribution. Encapsulation may be performed by dissolving lipid mixtures comprised of cationic lipid:DSPC:cholesterol:PEG-c-DOMG (40:10:40:10 molar ratio) in ethanol to a final lipid concentration of 10 mmol/1. This ethanol solution of lipid may be added drop-wise to 50 mmol/1 citrate, pH 4.0 to form multilamellar vesicles to produce a final concentration of 30% ethanol vol/vol. Large unilamellar vesicles may be formed following extrusion of multilamellar vesicles through two stacked 80 nm Nuclepore polycarbonate filters using the Extruder (Northern Lipids, Vancouver, Canada). Encapsulation may be achieved by adding RNA dissolved at 2 mg/ml in 50 mmol/1 citrate, pH 4.0 containing 30% ethanol vol/vol drop-wise to extruded preformed large unilamellar vesicles and incubation at 31° C. for 30 minutes with constant mixing to a final RNA/lipid weight ratio of 0.06/1 wt/wt. Removal of ethanol and neutralization of formulation buffer were performed by dialysis against phosphate-buffered saline (PBS), pH 7.4 for 16 hours using Spectra/Por 2 regenerated cellulose dialysis membranes. Nanoparticle size distribution may be determined by dynamic light scattering using a NICOMP 370 particle sizer, the vesicle/intensity modes, and Gaussian fitting (Nicomp Particle Sizing, Santa Barbara, Calif.). The particle size for all three LNP systems may be ˜70 nm in diameter. RNA encapsulation efficiency may be determined by removal of free RNA using VivaPureD MiniH columns (Sartorius Stedim Biotech) from samples collected before and after dialysis. The encapsulated RNA may be extracted from the eluted nanoparticles and quantified at 260 nm. RNA to lipid ratio was determined by measurement of cholesterol content in vesicles using the Cholesterol E enzymatic assay from Wako Chemicals USA (Richmond, Va.). In conjunction with the herein discussion of LNPs and PEG lipids, PEGylated liposomes or LNPs are likewise suitable for delivery of a CRISPR-Cas system or components thereof.

[0616] A lipid premix solution (20.4 mg/ml total lipid concentration) may be prepared in ethanol containing DLinKC2-DMA, DSPC, and cholesterol at 50:10:38.5 molar ratios. Sodium acetate may be added to the lipid premix at a molar ratio of 0.75:1 (sodium acetate:DLinKC2-DMA). The lipids may be subsequently hydrated by combining the mixture with 1.85 volumes of citrate buffer (10 mmol/1, pH 3.0) with vigorous stirring, resulting in spontaneous liposome formation in aqueous buffer containing 35% ethanol. The liposome solution may be incubated at 37° C. to allow for time-dependent increase in particle size. Aliquots may be removed at various times during incubation to investigate changes in liposome size by dynamic light scattering (Zetasizer Nano Z S, Malvern Instruments, Worcestershire, UK). Once the desired particle size is achieved, an aqueous PEG lipid solution (stock=10 mg/ml PEG-DMG in 35% (vol/vol) ethanol) may be added to the liposome mixture to yield a final PEG molar concentration of 3.5% of total lipid. Upon addition of PEG-lipids, the liposomes should their size, effectively quenching further growth. RNA may then be added to the empty liposomes at an RNA to total lipid ratio of approximately 1:10 (wt:wt), followed by incubation for 30 minutes at 37° C. to form loaded LNPs. The mixture may be subsequently dialyzed overnight in PBS and filtered with a 0.45-μm syringe filter.

[0617] Spherical Nucleic Acid (SNA™) constructs and other nanoparticles (particularly gold nanoparticles) are also contemplated as a means to delivery CRISPR-Cas system to intended targets. Significant data show that AuraSense Therapeutics' Spherical Nucleic Acid (SNA™) constructs, based upon nucleic acid-functionalized gold nanoparticles, are useful.

[0618] Literature that may be employed in conjunction with herein teachings include: Cutler et al., J. Am. Chem. Soc. 2011 133:9254-9257, Hao et al., Small. 2011 7:3158-3162, Zhang et al., ACS Nano. 2011 5:6962-6970, Cutler et al., J. Am. Chem. Soc. 2012 134:1376-1391, Young et al., Nano Lett. 2012 12:3867-71, Zheng et al., Proc. Natl. Acad. Sci. USA. 2012 109:11975-80, Mirkin, Nanomedicine 2012 7:635-638 Zhang et al., J. Am. Chem. Soc. 2012 134:16488-1691, Weintraub, Nature 2013 495:S14-S16, Choi et al., Proc. Natl. Acad. Sci. USA. 2013 110(19):7625-7630, Jensen et al., Sci. Transl. Med. 5, 209ra152 (2013) and Mirkin, et al., Small, 10:186-192.

[0619] Self-assembling nanoparticles with RNA may be constructed with polyethyleneimine (PEI) that is PEGylated with an Arg-Gly-Asp (RGD) peptide ligand attached at the distal end of the polyethylene glycol (PEG). This system has been used, for example, as a means to target tumor neovasculature expressing integrins and deliver siRNA inhibiting vascular endothelial growth factor receptor-2 (VEGF R2) expression and thereby achieve tumor angiogenesis (see, e.g., Schiffelers et al., Nucleic Acids Research, 2004, Vol. 32, No. 19). Nanoplexes may be prepared by mixing equal volumes of aqueous solutions of cationic polymer and nucleic acid to give a net molar excess of ionizable nitrogen (polymer) to phosphate (nucleic acid) over the range of 2 to 6. The electrostatic interactions between cationic polymers and nucleic acid resulted in the formation of polyplexes with average particle size distribution of about 100 nm, hence referred to here as nanoplexes. A dosage of about 100 to 200 mg of CRISPR Cas is envisioned for delivery in the self-assembling nanoparticles of Schiffelers et al.

[0620] The nanoplexes of Bartlett et al. (PNAS, Sep. 25, 2007,vol. 104, no. 39) may also be applied to the present invention. The nanoplexes of Bartlett et al. are prepared by mixing equal volumes of aqueous solutions of cationic polymer and nucleic acid to give a net molar excess of ionizable nitrogen (polymer) to phosphate (nucleic acid) over the range of 2 to 6. The electrostatic interactions between cationic polymers and nucleic acid resulted in the formation of polyplexes with average particle size distribution of about 100 nm, hence referred to here as nanoplexes. The DOTA-siRNA of Bartlett et al. was synthesized as follows: 1,4,7,10-tetraazacyclododecane-1,4,7,10-tetraacetic acid mono(N-hydroxysuccinimide ester) (DOTA-NHSester) was ordered from Macrocyclics (Dallas, Tex.). The amine modified RNA sense strand with a 100-fold molar excess of DOTA-NHS-ester in carbonate buffer (pH 9) was added to a microcentrifuge tube. The contents were reacted by stirring for 4 h at room temperature. The DOTA-RNAsense conjugate was ethanol-precipitated, resuspended in water, and annealed to the unmodified antisense strand to yield DOTA-siRNA. All liquids were pretreated with Chelex-100 (Bio-Rad, Hercules, Calif.) to remove trace metal contaminants. Tf-targeted and nontargeted siRNA nanoparticles may be formed by using cyclodextrin-containing polycations. Typically, nanoparticles were formed in water at a charge ratio of 3 (+/−) and an siRNA concentration of 0.5 g/liter. One percent of the adamantane-PEG molecules on the surface of the targeted nanoparticles were modified with Tf (adamantane-PEG-Tf). The nanoparticles were suspended in a 5% (wt/vol) glucose carrier solution for injection.

[0621] Davis et al. (Nature, Vol 464, 15 Apr. 2010) conducts a RNA clinical trial that uses a targeted nanoparticle-delivery system (clinical trial registration number NCT00689065). Patients with solid cancers refractory to standard-of-care therapies are administered doses of targeted nanoparticles on days 1, 3, 8 and 10 of a 21-day cycle by a 30-min intravenous infusion. The nanoparticles consist of a synthetic delivery system containing: (1) a linear, cyclodextrin-based polymer (CDP), (2) a human transferrin protein (TF) targeting ligand displayed on the exterior of the nanoparticle to engage TF receptors (TFR) on the surface of the cancer cells, (3) a hydrophilic polymer (polyethylene glycol (PEG) used to promote nanoparticle stability in biological fluids), and (4) siRNA designed to reduce the expression of the RRM2 (sequence used in the clinic was previously denoted siR2B+5). The TFR has long been known to be upregulated in malignant cells, and RRM2 is an established anti-cancer target. These nanoparticles (clinical version denoted as CALAA-01) have been shown to be well tolerated in multi-dosing studies in non-human primates. Although a single patient with chronic myeloid leukaemia has been administered siRNA by liposomal delivery, Davis et al.'s clinical trial is the initial human trial to systemically deliver siRNA with a targeted delivery system and to treat patients with solid cancer. To ascertain whether the targeted delivery system can provide effective delivery of functional siRNA to human tumors, Davis et al. investigated biopsies from three patients from three different dosing cohorts; patients A, B and C, all of whom had metastatic melanoma and received CALAA-01 doses of 18, 24 and 30 mg m-2 siRNA, respectively. Similar doses may also be contemplated for the CRISPR Cas system of the present invention. The delivery of the invention may be achieved with nanoparticles containing a linear, cyclodextrin-based polymer (CDP), a human transferrin protein (TF) targeting ligand displayed on the exterior of the nanoparticle to engage TF receptors (TFR) on the surface of the cancer cells and/or a hydrophilic polymer (for example, polyethylene glycol (PEG) used to promote nanoparticle stability in biological fluids).

[0622] U.S. Pat. No. 8,709,843, incorporated herein by reference, provides a drug delivery system for targeted delivery of therapeutic agent-containing particles to tissues, cells, and intracellular compartments. The invention provides targeted particles comprising comprising polymer conjugated to a surfactant, hydrophilic polymer or lipid. U.S. Pat. No. 6,007,845, incorporated herein by reference, provides particles which have a core of a multiblock copolymer formed by covalently linking a multifunctional compound with one or more hydrophobic polymers and one or more hydrophilic polymers, and contain a biologically active material. U.S. Pat. No. 5,855,913, incorporated herein by reference, provides a particulate composition having aerodynamically light particles having a tap density of less than 0.4 g/cm3 with a mean diameter of between 5 μm and 30 μm, incorporating a surfactant on the surface thereof for drug delivery to the pulmonary system. U.S. Pat. No. 5,985,309, incorporated herein by reference, provides particles incorporating a surfactant and/or a hydrophilic or hydrophobic complex of a positively or negatively charged therapeutic or diagnostic agent and a charged molecule of opposite charge for delivery to the pulmonary system. U.S. Pat. No. 5,543,158, incorporated herein by reference, provides biodegradable injectable particles having a biodegradable solid core containing a biologically active material and poly(alkylene glycol) moieties on the surface. WO2012135025 (also published as US20120251560), incorporated herein by reference, describes conjugated polyethyleneimine (PEI) polymers and conjugated aza-macrocycles (collectively referred to as “conjugated lipomer” or “lipomers”). In certain embodiments, it can envisioned that such conjugated lipomers can be used in the context of the CRISPR-Cas system to achieve in vitro, ex vivo and in vivo genomic perturbations to modify gene expression, including modulation of protein expression.

[0623] In one embodiment, the nanoparticle may be epoxide-modified lipid-polymer, advantageously 7C1 (see, e.g., James E. Dahlman and Carmen Barnes et al. Nature Nanotechnology (2014) published online 11 May 2014, doi:10.1038/nnano.2014.84). C71 was synthesized by reacting C15 epoxide-terminated lipids with PEI600 at a 14:1 molar ratio, and was formulated with C14PEG2000 to produce nanoparticles (diameter between 35 and 60 nm) that were stable in PBS solution for at least 40 days.

[0624] An epoxide-modified lipid-polymer may be utilized to deliver the CRISPR-Cas system of the present invention to pulmonary, cardiovascular or renal cells, however, one of skill in the art may adapt the system to deliver to other target organs. Dosage ranging from about 0.05 to about 0.6 mg/kg are envisioned. Dosages over several days or weeks are also envisioned, with a total dosage of about 2 mg/kg.

[0625] In some embodiments, the LNP for delivering the RNA molecules is prepared by methods known in the art, such as those described in, for example, WO 2005/105152 (PCT/EP2005/004920), WO 2006/069782 (PCT/EP2005/014074), WO 2007/121947 (PCT/EP2007/003496), and WO 2015/082080 (PCT/EP2014/003274), which are herein incorporated by reference. LNPs aimed specifically at the enhanced and improved delivery of siRNA into mammalian cells are described in, for example, Aleku et al., Cancer Res., 68(23): 9788-98 (Dec. 1, 2008), Strumberg et al., Int. J. Clin. Pharmacol. Ther., 50(1): 76-8 (January 2012), Schultheis et al., J. Clin. Oncol., 32(36): 4141-48 (Dec. 20, 2014), and Fehring et al., Mol. Ther., 22(4): 811-20 (Apr. 22, 2014), which are herein incorporated by reference and may be applied to the present technology.

[0626] In some embodiments, the LNP includes any LNP disclosed in WO 2005/105152 (PCT/EP2005/004920), WO 2006/069782 (PCT/EP2005/014074), WO 2007/121947 (PCT/EP2007/003496), and WO 2015/082080 (PCT/EP2014/003274).

[0627] In some embodiments, the LNP includes at least one lipid having Formula I:

[0628] (Formula I), wherein R1 and R2 are each and independently selected from the group comprising alkyl, n is any integer between 1 and 4, and R3 is an acyl selected from the group comprising lysyl, ornithyl, 2,4-diaminobutyryl, histidyl and an acyl moiety according to Formula II:

[chemical structure]

[0629] wherein m is any integer from 1 to 3 and Y⁻ is a pharmaceutically acceptable anion. In some embodiments, a lipid according to Formula I includes at least two asymmetric C atoms. In some embodiments, enantiomers of Formula I include, but are not limited to, R—R; S—S; R—S and S—R enantiomer.

[0630] In some embodiments, R1 is lauryl and R2 is myristyl. In another embodiment, R1 is palmityl and R2 is oleyl. In some embodiments, m is 1 or 2. In some embodiments, Y— is selected from halogenids, acetate or trifluoroacetate.

[0631] In some embodiments, the LNP comprises one or more lipids select from:
[0632] arginyl-2,3-diamino propionic acid-N-palmityl-N-oleyl-amide trihydrochloride (Formula III):

[chemical structure]

[0633] arginyl-2,3-diamino propionic acid-N-lauryl-N-myristyl-amide trihydrochloride (Formula IV):

[chemical structure]

and
[0634] arginyl-lysine-N-lauryl-N-myristyl-amide trihydrochloride (Formula V):

[chemical structure]

[0635] In some embodiments, the LNP also includes a constituent. By way of example, but not by way of limitation, in some embodiments, the constituent is selected from peptides, proteins, oligonucleotides, polynucleotides, nucleic acids, or a combination thereof. In some embodiments, the constituent is an antibody, e.g., a monoclonal antibody. In some embodiments, the constituent is a nucleic acid selected from, e.g., ribozymes, aptamers, spiegelmers, DNA, RNA, PNA, LNA, or a combination thereof. In some embodiments, the nucleic acid is guide RNA and/or mRNA.

[0636] In some embodiments, the constituent of the LNP comprises an mRNA encoding a CRIPSR-Cas protein. In some embodiments, the constituent of the LNP comprises an mRNA encoding a Type-II or Type-V CRIPSR-Cas protein. In some embodiments, the constituent of the LNP comprises an mRNA encoding an nucleotide deaminase (which may be fused to a CRISPR-Cas protein or an adaptor protein).

[0637] In some embodiments, the constituent of the LNP further comprises one or more guide RNA. In some embodiments, the LNP is configured to deliver the aforementioned mRNA and guide RNA to vascular endothelium. In some embodiments, the LNP is configured to deliver the aforementioned mRNA and guide RNA to pulmonary endothelium. In some embodiments, the LNP is configured to deliver the aforementioned mRNA and guide RNA to liver. In some embodiments, the LNP is configured to deliver the aforementioned mRNA and guide RNA to lung. In some embodiments, the LNP is configured to deliver the aforementioned mRNA and guide RNA to hearts. In some embodiments, the LNP is configured to deliver the aforementioned mRNA and guide RNA to spleen. In some embodiments, the LNP is configured to deliver the aforementioned mRNA and guide RNA to kidney. In some embodiments, the LNP is configured to deliver the aforementioned mRNA and guide RNA to pancrea. In some embodiments, the LNP is configured to deliver the aforementioned mRNA and guide RNA to brain. In some embodiments, the LNP is configured to deliver the aforementioned mRNA and guide RNA to macrophages.

[0638] In some embodiments, the LNP also includes at least one helper lipid. In some embodiments, the helper lipid is selected from phospholipids and steroids. In some embodiments, the phospholipids are di- and/or monoester of the phosphoric acid. In some embodiments, the phospholipids are phosphoglycerides and/or sphingolipids. In some embodiments, the steroids are naturally occurring and/or synthetic compounds based on the partially hydrogenated cyclopenta[a]phenanthrene. In some embodiments, the steroids contain 21 to 30 C atoms. In some embodiments, the steroid is cholesterol. In some embodiments, the helper lipid is selected from 1,2-diphytanoyl-sn-glycero-3-phosphoethanolamine (DPhyPE), ceramide, and 1,2-dioleylsn-glycero-3-phosphoethanolamine (DOPE).

[0639] In some embodiments, the at least one helper lipid comprises a moiety selected from the group comprising a PEG moiety, a HEG moiety, a polyhydroxyethyl starch (polyHES) moiety and a polypropylene moiety. In some embodiments, the moiety has a molecule weight between about 500 to 10,000 Da or between about 2,000 to 5,000 Da. In some embodiments, the PEG moiety is selected from 1,2-distearoyl-sn-glycero-3 phosphoethanolamine, 1,2-dialkyl-sn-glycero-3-phosphoethanolamine, and Ceramide-PEG. In some embodiments, the PEG moiety has a molecular weight between about 500 to 10,000 Da or between about 2,000 to 5,000 Da. In some embodiments, the PEG moiety has a molecular weight of 2,000 Da.

[0640] In some embodiments, the helper lipid is between about 20 mol % to 80 mol % of the total lipid content of the composition. In some embodiments, the helper lipid component is between about 35 mol % to 65 mol % of the total lipid content of the LNP. In some embodiments, the LNP includes lipids at 50 mol % and the helper lipid at 50 mol % of the total lipid content of the LNP.

[0641] In some embodiments, the LNP includes any of -3-arginyl-2,3-diaminopropionic acid-N-palmityl-N-oleyl-amide trihydrochloride, -arginyl-2,3-diaminopropionic acid-N-lauryl-N-myristyl-amide trihydrochloride or -arginyl-lysine-N-lauryl-N-myristyl-amide trihydrochloride in combination with DPhyPE, wherein the content of DPhyPE is about 80 mol %, 65 mol %, 50 mol % and 35 mol % of the overall lipid content of the LNP. In some embodiments, the LNP includes -arginyl-2,3-diamino propionic acid-N-pahnityl-N-oleyl-amide trihydrochloride (lipid) and 1,2-diphytanoyl-sn-glycero-3-phosphoethanolamine (helper lipid). In some embodiments, the LNP includes -arginyl-2,3-diamino propionic acid-N-palmityl-N-oleyl-amide trihydrochloride (lipid), 1,2-diphytanoyl-sn-glycero-3-phosphoethanolamine (first helper lipid), and 1,2-disteroyl-sn-glycero-3-phosphoethanolamine-PEG2000 (second helper lipid).

[0642] In some embodiments, the second helper lipid is between about 0.05 mol % to 4.9 mol % or between about 1 mol % to 3 mol % of the total lipid content. In some embodiments, the LNP includes lipids at between about 45 mol % to 50 mol % of the total lipid content, a first helper lipid between about 45 mol % to 50 mol % of the total lipid content, under the proviso that there is a PEGylated second helper lipid between about 0.1 mol % to 5 mol %, between about 1 mol % to 4 mol %, or at about 2 mol % of the total lipid content, wherein the sum of the content of the lipids, the first helper lipid, and of the second helper lipid is 100 mol % of the total lipid content and wherein the sum of the first helper lipid and the second helper lipid is 50 mol % of the total lipid content. In some embodiments, the LNP comprises: (a) 50 mol % of -arginyl-2,3-diamino propionic acid-N-palmityl-N-oleyl-amide trihydrochloride, 48 mol % of 1,2-diphytanoyl-sn-glycero-3-phosphoethanolamine; and 2 mol % 1,2-distearoyl-sn-glycero-3-phosphoethanolamine-PEG2000; or (b) 50 mol % of -arginyl-2,3-diamino propionic acid-N-palmityl-N-oleyl-amide trihydrocloride, 49 mol % 1,2-diphytanoyl-sn-glycero-3-phosphoethanolamine; and 1 mol % N(Carbonyl-methoxypolyethylenglycol-2000)-1,2-di stearoyl-sn-glycero3-phosphoethanolamine, or a sodium salt thereof.

[0643] In some embodiments, the LNP contains a nucleic acid, wherein the charge ratio of nucleic acid backbone phosphates to cationic lipid nitrogen atoms is about 1: 1.5-7 or about 1:4.

[0644] In some embodiments, the LNP also includes a shielding compound, which is removable from the lipid composition under in vivo conditions. In some embodiments, the shielding compound is a biologically inert compound. In some embodiments, the shielding compound does not carry any charge on its surface or on the molecule as such. In some embodiments, the shielding compounds are polyethylenglycoles (PEGs), hydroxyethylglucose (HEG) based polymers, polyhydroxyethyl starch (polyHES) and polypropylene. In some embodiments, the PEG, HEG, polyHES, and a polypropylene weight between about 500 to 10,000 Da or between about 2000 to 5000 Da. In some embodiments, the shielding compound is PEG2000 or PEG5000.

[0645] In some embodiments, the LNP includes at least one lipid, a first helper lipid, and a shielding compound that is removable from the lipid composition under in vivo conditions. In some embodiments, the LNP also includes a second helper lipid. In some embodiments, the first helper lipid is ceramide. In some embodiments, the second helper lipid is ceramide. In some embodiments, the ceramide comprises at least one short carbon chain substituent of from 6 to 10 carbon atoms. In some embodiments, the ceramide comprises 8 carbon atoms. In some embodiments, the shielding compound is attached to a ceramide. In some embodiments, the shielding compound is attached to a ceramide. In some embodiments, the shielding compound is covalently attached to the ceramide. In some embodiments, the shielding compound is attached to a nucleic acid in the LNP. In some embodiments, the shielding compound is covalently attached to the nucleic acid. In some embodiments, the shielding compound is attached to the nucleic acid by a linker. In some embodiments, the linker is cleaved under physiological conditions. In some embodiments, the linker is selected from ssRNA, ssDNA, dsRNA, dsDNA, peptide, S—S-linkers and pH sensitive linkers. In some embodiments, the linker moiety is attached to the 3′ end of the sense strand of the nucleic acid. In some embodiments, the shielding compound comprises a pH-sensitive linker or a pH-sensitive moiety. In some embodiments, the pH-sensitive linker or pH-sensitive moiety is an anionic linker or an anionic moiety. In some embodiments, the anionic linker or anionic moiety is less anionic or neutral in an acidic environment. In some embodiments, the pH-sensitive linker or the pH-sensitive moiety is selected from the oligo (glutamic acid), oligophenolate(s) and diethylene triamine penta acetic acid.

[0646] In any of the LNP embodiments in the previous paragraph, the LNP can have an osmolality between about 50 to 600 mosmole/kg, between about 250 to 350 mosmole/kg, or between about 280 to 320 mosmole/kg, and/or wherein the LNP formed by the lipid and/or one or two helper lipids and the shielding compound have a particle size between about 20 to 200 nm, between about 30 to 100 nm, or between about 40 to 80 nm.

[0647] In some embodiments, the shielding compound provides for a longer circulation time in vivo and allows for a better biodistribution of the nucleic acid containing LNP. In some embodiments, the shielding compound prevents immediate interaction of the LNP with serum compounds or compounds of other bodily fluids or cytoplasma membranes, e.g., cytoplasma membranes of the endothelial lining of the vasculature, into which the LNP is administered. Additionally or alternatively, in some embodiments, the shielding compounds also prevent elements of the immune system from immediately interacting with the LNP. Additionally or alternatively, in some embodiments, the shielding compound acts as an anti-opsonizing compound. Without wishing to be bound by any mechanism or theory, in some embodiments, the shielding compound forms a cover or coat that reduces the surface area of the LNP available for interaction with its environment. Additionally or alternatively, in some embodiments, the shielding compound shields the overall charge of the LNP.

[0648] In another embodiment, the LNP includes at least one cationic lipid having Formula VI:

[chemical structure]

wherein n is 1, 2, 3, or 4, wherein m is 1, 2, or 3, wherein Y⁻ is anion, wherein each of R¹ and R² is individually and independently selected from the group consisting of linear C12-C18 alkyl and linear C12-C18 alkenyl, a sterol compound, wherein the sterol compound is selected from the group consisting of cholesterol and stigmasterol, and a PEGylated lipid, wherein the PEGylated lipid comprises a PEG moiety, wherein the PEGylated lipid is selected from the group consisting of:
a PEGylated phosphoethanolamine of Formula VII:

[chemical structure]

wherein R³ and R⁴ are individually and independently linear C13-C17 alkyl, and p is any integer between 15 to 130;
a PEGylated ceramide of Formula VIII:

[chemical structure]

wherein R⁵ is linear C7-C15 alkyl, and q is any number between 15 to 130; and
a PEGylated diacylglycerol of Formula IX:

[chemical structure]

wherein each of R⁶ and R⁷ is individually and independently linear C11-C17 alkyl, and r is any integer from 15 to 130.

[0649] In some embodiments, 10 and R² are different from each other. In some embodiments, R¹ is palmityl and R² is oleyl. In some embodiments, 10 is lauryl and R² is myristyl. In some embodiments, 10 and R² are the same. In some embodiments, each of 10 and R² is individually and independently selected from the group consisting of C12 alkyl, C14 alkyl, C16 alkyl, C18 alkyl, C12 alkenyl, C14 alkenyl, C16 alkenyl and C18 alkenyl. In some embodiments, each of C12 alkenyl, C14 alkenyl, C16 alkenyl and C18 alkenyl comprises one or two double bonds. In some embodiments, C18 alkenyl is C18 alkenyl with one double bond between C9 and C10. In some embodiments, C18 alkenyl is cis-9-octadecyl.

[0650] In some embodiments, the cationic lipid is a compound of Formula X:

[chemical structure]

In some embodiments, Y⁻ is selected from halogenids, acetate and trifluoroacetate. In some embodiments, the cationic lipid is -arginyl-2,3-diamino propionic acid-N-palmityl-N-oleyl-amide trihydrochloride of Formula III:

[chemical structure]

In some embodiments, the cationic lipid is -arginyl-2,3-diamino propionic acid-N-lauryl-N-myristyl-amide trihydrochloride of Formula IV:

[chemical structure]

In some embodiments, the cationic lipid is -arginyl-lysine-N-lauryl-N-myristyl-amide trihydrochloride of Formula V:

[chemical structure]

[0651] In some embodiments, the sterol compound is cholesterol. In some embodiments, the sterol compound is stigmasterin.

[0652] In some embodiments, the PEG moiety of the PEGylated lipid has a molecular weight from about 800 to 5,000 Da. In some embodiments, the molecular weight of the PEG moiety of the PEGylated lipid is about 800 Da. In some embodiments, the molecular weight of the PEG moiety of the PEGylated lipid is about 2,000 Da. In some embodiments, the molecular weight of the PEG moiety of the PEGylated lipid is about 5,000 Da. In some embodiments, the PEGylated lipid is a PEGylated phosphoethanolamine of Formula VII, wherein each of R³ and R⁴ is individually and independently linear C13-C17 alkyl, and p is any integer from 18, 19 or 20, or from 44, 45 or 46 or from 113, 114 or 115. In some embodiments, R³ and R⁴ are the same. In some embodiments, R³ and R⁴ are different. In some embodiments, each of R³ and R⁴ is individually and independently selected from the group consisting of C13 alkyl, C15 alkyl and C17 alkyl. In some embodiments, the PEGylated phosphoethanolamine of Formula VII is 1,2-distearoyl-sn-glycero-3-phosphoethanolamine-N-[methoxy(polyethylene glycol)-2000] (ammonium salt):

[chemical structure]

(Formula XI). In some embodiments, the PEGylated phosphoethanolamine of Formula VII is 1,2-distearoyl-sn-glycero-3-phosphoethanolamine-N-[methoxy(polyethylene glycol)-5000] (ammonium salt):

[chemical structure]

(Formula XII). In some embodiments, the PEGylated lipid is a PEGylated ceramide of Formula VIII, wherein R⁵ is linear C7-C15 alkyl, and q is any integer from 18, 19 or 20, or from 44, 45 or 46 or from 113, 114 or 115. In some embodiments, R⁵ is linear C7 alkyl. In some embodiments, R⁵ is linear C15 alkyl. In some embodiments, the PEGylated ceramide of Formula VIII is N-octanoyl-sphingosine-1-{succinyl [methoxy(polyethylene glycol)2000]}:

[chemical structure]

(Formula XIII). In some embodiments, the PEGylated ceramide of Formula VIII is N-palmitoyl-sphingosine-1-{succinyl [methoxy(polyethylene glycol)2000]}

[chemical structure]

(Formula XIV). In some embodiments, the PEGylated lipid is a PEGylated diacylglycerol of Formula IX, wherein each of R⁶ and R⁷ is individually and independently linear C11-C17 alkyl, and r is any integer from 18, 19 or 20, or from 44, 45 or 46 or from 113, 114 or 115. In some embodiments, R⁶ and R⁷ are the same. In some embodiments, R⁶ and R⁷ are different. In some embodiments, each of R⁶ and R⁷ is individually and independently selected from the group consisting of linear C17 alkyl, linear C15 alkyl and linear C13 alkyl. In some embodiments, the PEGylated diacylglycerol of Formula IX 1,2-Distearoyl-sn-glycerol [methoxy(polyethylene glycol)2000]:

[chemical structure]

In some embodiments, the PEGylated diacylglycerol of Formula IX is 1,2-Dipalmitoyl-sn-glycerol [methoxy(polyethylene glycol)2000]:

[chemical structure]

In some embodiments, the PEGylated diacylglycerol of Formula IX is:

[chemical structure]

In some embodiments, the LNP includes at least one cationic lipid selected from of Formulas III, IV, and V, at least one sterol compound selected from a cholesterol and stigmasterin, and wherein the PEGylated lipid is at least one selected from Formulas XI and XII. In some embodiments, the LNP includes at least one cationic lipid selected from Formulas III, IV, and V, at least one sterol compound selected from a cholesterol and stigmasterin, and wherein the PEGylated lipid is at least one selected from Formulas XIII and XIV. In some embodiments, the LNP includes at least one cationic lipid selected from Formulas III, IV, and V, at least one sterol compound selected from a cholesterol and stigmasterin, and wherein the PEGylated lipid is at least one selected from Formulas XV and XVI. In some embodiments, the LNP includes a cationic lipid of Formula III, a cholesterol as the sterol compound, and wherein the PEGylated lipid is Formula XI.

[0653] In any of the LNP embodiments in the previous paragraph, wherein the content of the cationic lipid composition is between about 65 mole % to 75 mole %, the content of the sterol compound is between about 24 mole % to 34 mole % and the content of the PEGylated lipid is between about 0.5 mole % to 1.5 mole %, wherein the sum of the content of the cationic lipid, of the sterol compound and of the PEGylated lipid for the lipid composition is 100 mole %. In some embodiments, the cationic lipid is about 70 mole %, the content of the sterol compound is about 29 mole % and the content of the PEGylated lipid is about 1 mole %. In some embodiments, the LNP is 70 mole % of Formula III, 29 mole % of cholesterol, and 1 mole % of Formula XI.

### Exosomes

[0654] Exosomes are endogenous nano-vesicles that transport RNAs and proteins, and which can deliver RNA to the brain and other target organs. To reduce immunogenicity, Alvarez-Erviti et al. (2011, Nat Biotechnol 29: 341) used self-derived dendritic cells for exosome production. Targeting to the brain was achieved by engineering the dendritic cells to express Lamp2b, an exosomal membrane protein, fused to the neuron-specific RVG peptide. Purified exosomes were loaded with exogenous RNA by electroporation. Intravenously injected RVG-targeted exosomes delivered GAPDH siRNA specifically to neurons, microglia, oligodendrocytes in the brain, resulting in a specific gene knockdown. Pre-exposure to RVG exosomes did not attenuate knockdown, and non-specific uptake in other tissues was not observed. The therapeutic potential of exosome-mediated siRNA delivery was demonstrated by the strong mRNA (60%) and protein (62%) knockdown of BACE1, a therapeutic target in Alzheimer's disease.

[0655] To obtain a pool of immunologically inert exosomes, Alvarez-Erviti et al. harvested bone marrow from inbred C57BL/6 mice with a homogenous major histocompatibility complex (MEW) haplotype. As immature dendritic cells produce large quantities of exosomes devoid of T-cell activators such as MHC-II and CD86, Alvarez-Erviti et al. selected for dendritic cells with granulocyte/macrophage-colony stimulating factor (GM-CSF) for 7 d. Exosomes were purified from the culture supernatant the following day using well-established ultracentrifugation protocols. The exosomes produced were physically homogenous, with a size distribution peaking at 80 nm in diameter as determined by nanoparticle tracking analysis (NTA) and electron microscopy. Alvarez-Erviti et al. obtained 6-12 μg of exosomes (measured based on protein concentration) per 106 cells.

[0656] Next, Alvarez-Erviti et al. investigated the possibility of loading modified exosomes with exogenous cargoes using electroporation protocols adapted for nanoscale applications. As electroporation for membrane particles at the nanometer scale is not well-characterized, nonspecific Cy5-labeled RNA was used for the empirical optimization of the electroporation protocol. The amount of encapsulated RNA was assayed after ultracentrifugation and lysis of exosomes. Electroporation at 400 V and 125 μF resulted in the greatest retention of RNA and was used for all subsequent experiments.

[0657] Alvarez-Erviti et al. administered 150 μg of each BACE1 siRNA encapsulated in 150 μg of RVG exosomes to normal C57BL/6 mice and compared the knockdown efficiency to four controls: untreated mice, mice injected with RVG exosomes only, mice injected with BACE1 siRNA complexed to an in vivo cationic liposome reagent and mice injected with BACE1 siRNA complexed to RVG-9R, the RVG peptide conjugated to 9 D-arginines that electrostatically binds to the siRNA. Cortical tissue samples were analyzed 3 d after administration and a significant protein knockdown (45%, P<0.05, versus 62%, P<0.01) in both siRNA-RVG-9R-treated and siRNARVG exosome-treated mice was observed, resulting from a significant decrease in BACE1 mRNA levels (66% [+ or -] 15%, P<0.001 and 61% [+ or -] 13% respectively, P<0.01). Moreover, Applicants demonstrated a significant decrease (55%, P<0.05) in the total [beta]-amyloid 1-42 levels, a main component of the amyloid plaques in Alzheimer's pathology, in the RVG-exosome-treated animals. The decrease observed was greater than the β-amyloid 1-40 decrease demonstrated in normal mice after intraventricular injection of BACE1 inhibitors. Alvarez-Erviti et al. carried out 5′-rapid amplification of cDNA ends (RACE) on BACE1 cleavage product, which provided evidence of RNAi-mediated knockdown by the siRNA.

[0658] Finally, Alvarez-Erviti et al. investigated whether RNA-RVG exosomes induced immune responses in vivo by assessing IL-6, IP-10, TNFα and IFN-α serum concentrations. Following exosome treatment, nonsignificant changes in all cytokines were registered similar to siRNA-transfection reagent treatment in contrast to siRNA-RVG-9R, which potently stimulated IL-6 secretion, confirming the immunologically inert profile of the exosome treatment. Given that exosomes encapsulate only 20% of siRNA, delivery with RVG-exosome appears to be more efficient than RVG-9R delivery as comparable mRNA knockdown and greater protein knockdown was achieved with fivefold less siRNA without the corresponding level of immune stimulation. This experiment demonstrated the therapeutic potential of RVG-exosome technology, which is potentially suited for long-term silencing of genes related to neurodegenerative diseases. The exosome delivery system of Alvarez-Erviti et al. may be applied to deliver the AD-functionalized CRISPR-Cas system of the present invention to therapeutic targets, especially neurodegenerative diseases. A dosage of about 100 to 1000 mg of CRISPR Cas encapsulated in about 100 to 1000 mg of RVG exosomes may be contemplated for the present invention.

[0659] El-Andaloussi et al. (Nature Protocols 7, 2112-2126(2012)) discloses how exosomes derived from cultured cells can be harnessed for delivery of RNA in vitro and in vivo. This protocol first describes the generation of targeted exosomes through transfection of an expression vector, comprising an exosomal protein fused with a peptide ligand. Next, El-Andaloussi et al. explain how to purify and characterize exosomes from transfected cell supernatant. Next, El-Andaloussi et al. detail crucial steps for loading RNA into exosomes. Finally, El-Andaloussi et al. outline how to use exosomes to efficiently deliver RNA in vitro and in vivo in mouse brain. Examples of anticipated results in which exosome-mediated RNA delivery is evaluated by functional assays and imaging are also provided. The entire protocol takes ˜3 weeks. Delivery or administration according to the invention may be performed using exosomes produced from self-derived dendritic cells. From the herein teachings, this can be employed in the practice of the invention.

[0660] In another embodiment, the plasma exosomes of Wahlgren et al. (Nucleic Acids Research, 2012, Vol. 40, No. 17 e130) are contemplated. Exosomes are nano-sized vesicles (30-90 nm in size) produced by many cell types, including dendritic cells (DC), B cells, T cells, mast cells, epithelial cells and tumor cells. These vesicles are formed by inward budding of late endosomes and are then released to the extracellular environment upon fusion with the plasma membrane. Because exosomes naturally carry RNA between cells, this property may be useful in gene therapy, and from this disclosure can be employed in the practice of the instant invention.

[0661] Exosomes from plasma can be prepared by centrifugation of buffy coat at 900 g for 20 min to isolate the plasma followed by harvesting cell supernatants, centrifuging at 300 g for 10 min to eliminate cells and at 16 500 g for 30 min followed by filtration through a 0.22 mm filter. Exosomes are pelleted by ultracentrifugation at 120 000 g for 70 min. Chemical transfection of siRNA into exosomes is carried out according to the manufacturer's instructions in RNAi Human/Mouse Starter Kit (Quiagen, Hilden, Germany). siRNA is added to 100 ml PBS at a final concentration of 2 mmol/ml. After adding HiPerFect transfection reagent, the mixture is incubated for 10 min at RT. In order to remove the excess of micelles, the exosomes are re-isolated using aldehyde/sulfate latex beads. The chemical transfection of CRISPR Cas into exosomes may be conducted similarly to siRNA. The exosomes may be co-cultured with monocytes and lymphocytes isolated from the peripheral blood of healthy donors. Therefore, it may be contemplated that exosomes containing CRISPR Cas may be introduced to monocytes and lymphocytes of and autologously reintroduced into a human. Accordingly, delivery or administration according to the invention may be performed using plasma exosomes.

### Liposomes

[0662] Delivery or administration according to the invention can be performed with liposomes. Liposomes are spherical vesicle structures composed of a uni- or multilamellar lipid bilayer surrounding internal aqueous compartments and a relatively impermeable outer lipophilic phospholipid bilayer. Liposomes have gained considerable attention as drug delivery carriers because they are biocompatible, nontoxic, can deliver both hydrophilic and lipophilic drug molecules, protect their cargo from degradation by plasma enzymes, and transport their load across biological membranes and the blood brain barrier (BBB) (see, e.g., Spuch and Navarro, Journal of Drug Delivery, vol. 2011, Article ID 469679, 12 pages, 2011. doi:10.1155/2011/469679 for review).

[0663] Liposomes can be made from several different types of lipids; however, phospholipids are most commonly used to generate liposomes as drug carriers. Although liposome formation is spontaneous when a lipid film is mixed with an aqueous solution, it can also be expedited by applying force in the form of shaking by using a homogenizer, sonicator, or an extrusion apparatus (see, e.g., Spuch and Navarro, Journal of Drug Delivery, vol. 2011, Article ID 469679, 12 pages, 2011. doi:10.1155/2011/469679 for review).

[0664] Several other additives may be added to liposomes in order to modify their structure and properties. For instance, either cholesterol or sphingomyelin may be added to the liposomal mixture in order to help stabilize the liposomal structure and to prevent the leakage of the liposomal inner cargo. Further, liposomes are prepared from hydrogenated egg phosphatidylcholine or egg phosphatidylcholine, cholesterol, and dicetyl phosphate, and their mean vesicle sizes were adjusted to about 50 and 100 nm. (see, e.g., Spuch and Navarro, Journal of Drug Delivery, vol. 2011, Article ID 469679, 12 pages, 2011. doi:10.1155/2011/469679 for review).

[0665] A liposome formulation may be mainly comprised of natural phospholipids and lipids such as 1,2-distearoryl-sn-glycero-3-phosphatidyl choline (DSPC), sphingomyelin, egg phosphatidylcholines and monosialoganglioside. Since this formulation is made up of phospholipids only, liposomal formulations have encountered many challenges, one of the ones being the instability in plasma. Several attempts to overcome these challenges have been made, specifically in the manipulation of the lipid membrane. One of these attempts focused on the manipulation of cholesterol. Addition of cholesterol to conventional formulations reduces rapid release of the encapsulated bioactive compound into the plasma or 1,2-dioleoyl-sn-glycero-3-phosphoethanolamine (DOPE) increases the stability (see, e.g., Spuch and Navarro, Journal of Drug Delivery, vol. 2011, Article ID 469679, 12 pages, 2011. doi:10.1155/2011/469679 for review).

[0666] In a particularly advantageous embodiment, Trojan Horse liposomes (also known as Molecular Trojan Horses) are desirable and protocols may be found at http://cshprotocols.cshlp.org/content/2010/4/pdb.prot5407.long. These particles allow delivery of a transgene to the entire brain after an intravascular injection. Without being bound by limitation, it is believed that neutral lipid particles with specific antibodies conjugated to surface allow crossing of the blood brain barrier via endocytosis. Trojan Horse Liposomes may be used to deliver the CRISPR family of nucleases to the brain via an intravascular injection, which would allow whole brain transgenic animals without the need for embryonic manipulation. About 1-5 g of DNA or RNA may be contemplated for in vivo administration in liposomes.

[0667] In another embodiment, the AD-functionalized CRISPR Cas system or components thereof may be administered in liposomes, such as a stable nucleic-acid-lipid particle (SNALP) (see, e.g., Morrissey et al., Nature Biotechnology, Vol. 23, No. 8, August 2005). Daily intravenous injections of about 1, 3 or 5 mg/kg/day of a specific CRISPR Cas targeted in a SNALP are contemplated. The daily treatment may be over about three days and then weekly for about five weeks. In another embodiment, a specific CRISPR Cas encapsulated SNALP) administered by intravenous injection to at doses of about 1 or 2.5 mg/kg are also contemplated (see, e.g., Zimmerman et al., Nature Letters, Vol. 441, 4 May 2006). The SNALP formulation may contain the lipids 3-N-[(wmethoxypoly(ethylene glycol) 2000) carbamoyl]-1,2-dimyristyloxy-propylamine (PEG-C-DMA), 1,2-dilinoleyloxy-N,N-dimethyl-3-aminopropane (DLinDMA), 1,2-distearoyl-sn-glycero-3-phosphocholine (DSPC) and cholesterol, in a 2:40:10:48 molar percent ratio (see, e.g., Zimmerman et al., Nature Letters, Vol. 441, 4 May 2006).

[0668] In another embodiment, stable nucleic-acid-lipid particles (SNALPs) have proven to be effective delivery molecules to highly vascularized HepG2-derived liver tumors but not in poorly vascularized HCT-116 derived liver tumors (see, e.g., Li, Gene Therapy (2012) 19, 775-780). The SNALP liposomes may be prepared by formulating D-Lin-DMA and PEG-C-DMA with distearoylphosphatidylcholine (DSPC), Cholesterol and siRNA using a 25:1 lipid/siRNA ratio and a 48/40/10/2 molar ratio of Cholesterol/D-Lin-DMA/DSPC/PEG-C-DMA. The resulted SNALP liposomes are about 80-100 nm in size.

[0669] In yet another embodiment, a SNALP may comprise synthetic cholesterol (Sigma-Aldrich, St Louis, Mo., USA), dipalmitoylphosphatidylcholine (Avanti Polar Lipids, Alabaster, Ala., USA), 3-N-[(w-methoxy poly(ethylene glycol)2000)carbamoyl]-1,2-dimyrestyloxypropylamine, and cationic 1,2-dilinoleyloxy-3-N,Ndimethylaminopropane (see, e.g., Geisbert et al., Lancet 2010; 375: 1896-905). A dosage of about 2 mg/kg total CRISPR Cas per dose administered as, for example, a bolus intravenous infusion may be contemplated.

[0670] In yet another embodiment, a SNALP may comprise synthetic cholesterol (Sigma-Aldrich), 1,2-distearoyl-sn-glycero-3-phosphocholine (DSPC; Avanti Polar Lipids Inc.), PEG-cDMA, and 1,2-dilinoleyloxy-3-(N;N-dimethyl)aminopropane (DLinDMA) (see, e.g., Judge, J. Clin. Invest. 119:661-673 (2009)). Formulations used for in vivo studies may comprise a final lipid/RNA mass ratio of about 9:1.

[0671] The safety profile of RNAi nanomedicines has been reviewed by Barros and Gollob of Alnylam Pharmaceuticals (see, e.g., Advanced Drug Delivery Reviews 64 (2012) 1730-1737). The stable nucleic acid lipid particle (SNALP) is comprised of four different lipids—an ionizable lipid (DLinDMA) that is cationic at low pH, a neutral helper lipid, cholesterol, and a diffusible polyethylene glycol (PEG)-lipid. The particle is approximately 80 nm in diameter and is charge-neutral at physiologic pH. During formulation, the ionizable lipid serves to condense lipid with the anionic RNA during particle formation. When positively charged under increasingly acidic endosomal conditions, the ionizable lipid also mediates the fusion of SNALP with the endosomal membrane enabling release of RNA into the cytoplasm. The PEG-lipid stabilizes the particle and reduces aggregation during formulation, and subsequently provides a neutral hydrophilic exterior that improves pharmacokinetic properties.

[0672] To date, two clinical programs have been initiated using SNALP formulations with RNA. Tekmira Pharmaceuticals recently completed a phase I single-dose study of SNALP-ApoB in adult volunteers with elevated LDL cholesterol. ApoB is predominantly expressed in the liver and jejunum and is essential for the assembly and secretion of VLDL and LDL. Seventeen subjects received a single dose of SNALP-ApoB (dose escalation across 7 dose levels). There was no evidence of liver toxicity (anticipated as the potential dose-limiting toxicity based on preclinical studies). One (of two) subjects at the highest dose experienced flu-like symptoms consistent with immune system stimulation, and the decision was made to conclude the trial.

[0673] Alnylam Pharmaceuticals has similarly advanced ALN-TTR01, which employs the SNALP technology described above and targets hepatocyte production of both mutant and wild-type TTR to treat TTR amyloidosis (ATTR). Three ATTR syndromes have been described: familial amyloidotic polyneuropathy (FAP) and familial amyloidotic cardiomyopathy (FAC)—both caused by autosomal dominant mutations in TTR; and senile systemic amyloidosis (SSA) cause by wildtype TTR. A placebo-controlled, single dose-escalation phase I trial of ALN-TTR01 was recently completed in patients with ATTR. ALN-TTR01 was administered as a 15-minute IV infusion to 31 patients (23 with study drug and 8 with placebo) within a dose range of 0.01 to 1.0 mg/kg (based on siRNA). Treatment was well tolerated with no significant increases in liver function tests. Infusion-related reactions were noted in 3 of 23 patients at ≥0.4 mg/kg; all responded to slowing of the infusion rate and all continued on study. Minimal and transient elevations of serum cytokines IL-6, IP-10 and IL-1ra were noted in two patients at the highest dose of 1 mg/kg (as anticipated from preclinical and NHP studies). Lowering of serum TTR, the expected pharmacodynamics effect of ALN-TTR01, was observed at 1 mg/kg.

[0674] In yet another embodiment, a SNALP may be made by solubilizing a cationic lipid, DSPC, cholesterol and PEG-lipid e.g., in ethanol, e.g., at a molar ratio of 40:10:40:10, respectively (see, Semple et al., Nature Niotechnology, Volume 28 Number 2 Feb. 2010, pp. 172-177). The lipid mixture was added to an aqueous buffer (50 mM citrate, pH 4) with mixing to a final ethanol and lipid concentration of 30% (vol/vol) and 6.1 mg/ml, respectively, and allowed to equilibrate at 22° C. for 2 min before extrusion. The hydrated lipids were extruded through two stacked 80 nm pore-sized filters (Nuclepore) at 22° C. using a Lipex Extruder (Northern Lipids) until a vesicle diameter of 70-90 nm, as determined by dynamic light scattering analysis, was obtained. This generally required 1-3 passes. The siRNA (solubilized in a 50 mM citrate, pH 4 aqueous solution containing 30% ethanol) was added to the pre-equilibrated (35° C.) vesicles at a rate of ˜5 ml/min with mixing. After a final target siRNA/lipid ratio of 0.06 (wt/wt) was reached, the mixture was incubated for a further 30 min at 35° C. to allow vesicle reorganization and encapsulation of the siRNA. The ethanol was then removed and the external buffer replaced with PBS (155 mM NaCl, 3 mM Na2HPO4, 1 mM KH2PO4, pH 7.5) by either dialysis or tangential flow diafiltration. siRNA were encapsulated in SNALP using a controlled step-wise dilution method process. The lipid constituents of KC2-SNALP were DLin-KC2-DMA (cationic lipid), dipalmitoylphosphatidylcholine (DPPC; Avanti Polar Lipids), synthetic cholesterol (Sigma) and PEG-C-DMA used at a molar ratio of 57.1:7.1:34.3:1.4. Upon formation of the loaded particles, SNALP were dialyzed against PBS and filter sterilized through a 0.2 μm filter before use. Mean particle sizes were 75-85 nm and 90-95% of the siRNA was encapsulated within the lipid particles. The final siRNA/lipid ratio in formulations used for in vivo testing was ˜0.15 (wt/wt). LNP-siRNA systems containing Factor VII siRNA were diluted to the appropriate concentrations in sterile PBS immediately before use and the formulations were administered intravenously through the lateral tail vein in a total volume of 10 ml/kg. This method and these delivery systems may be extrapolated to the AD-functionalized CRISPR Cas system of the present invention.

### Other Lipids

[0675] Other cationic lipids, such as amino lipid 2,2-dilinoleyl-4-dimethylaminoethyl-[1,3]-dioxolane (DLin-KC2-DMA) may be utilized to encapsulate CRISPR Cas or components thereof or nucleic acid molecule(s) coding therefor e.g., similar to SiRNA (see, e.g., Jayaraman, Angew. Chem. Int. Ed. 2012, 51, 8529-8533), and hence may be employed in the practice of the invention. A preformed vesicle with the following lipid composition may be contemplated: amino lipid, di stearoylphosphatidylcholine (DSPC), cholesterol and (R)-2,3-bis(octadecyloxy) propyl-1-(methoxy poly(ethylene glycol)2000)propylcarbamate (PEG-lipid) in the molar ratio 40/10/40/10, respectively, and a FVII siRNA/total lipid ratio of approximately 0.05 (w/w). To ensure a narrow particle size distribution in the range of 70-90 nm and a low polydispersity index of 0.11+0.04 (n=56), the particles may be extruded up to three times through 80 nm membranes prior to adding the guide RNA. Particles containing the highly potent amino lipid 16 may be used, in which the molar ratio of the four lipid components 16, DSPC, cholesterol and PEG-lipid (50/10/38.5/1.5) which may be further optimized to enhance in vivo activity.

[0676] Michael S D Kormann et al. (“Expression of therapeutic proteins after delivery of chemically modified mRNA in mice: Nature Biotechnology, Volume:29, Pages: 154-157 (2011)) describes the use of lipid envelopes to deliver RNA. Use of lipid envelopes is also preferred in the present invention.

[0677] In another embodiment, lipids may be formulated with the AD-functionalized CRISPR Cas system of the present invention or component(s) thereof or nucleic acid molecule(s) coding therefor to form lipid nanoparticles (LNPs). Lipids include, but are not limited to, DLin-KC2-DMA4, C12-200 and colipids disteroylphosphatidyl choline, cholesterol, and PEG-DMG may be formulated with CRISPR Cas instead of siRNA (see, e.g., Novobrantseva, Molecular Therapy—Nucleic Acids (2012) 1, e4; doi:10.1038/mtna.2011.3) using a spontaneous vesicle formation procedure. The component molar ratio may be about 50/10/38.5/1.5 (DLin-KC2-DMA or C12-200/disteroylphosphatidyl choline/cholesterol/PEG-DMG). The final lipid: siRNA weight ratio may be ˜12:1 and 9:1 in the case of DLin-KC2-DMA and C12-200 lipid nanoparticles (LNPs), respectively. The formulations may have mean particle diameters of ˜80 nm with >90% entrapment efficiency. A 3 mg/kg dose may be contemplated.

[0678] Tekmira has a portfolio of approximately 95 patent families, in the U.S. and abroad, that are directed to various aspects of LNPs and LNP formulations (see, e.g., U.S. Pat. Nos. 7,982,027; 7,799,565; 8,058,069; 8,283,333; 7,901,708; 7,745,651; 7,803,397; 8,101,741; 8,188,263; 7,915,399; 8,236,943 and 7,838,658 and European Pat. Nos 1766035; 1519714; 1781593 and 1664316), all of which may be used and/or adapted to the present invention.

[0679] The AD-functionalized CRISPR Cas system or components thereof or nucleic acid molecule(s) coding therefor may be delivered encapsulated in PLGA Microspheres such as that further described in US published applications 20130252281 and 20130245107 and 20130244279 (assigned to Moderna Therapeutics) which relate to aspects of formulation of compositions comprising modified nucleic acid molecules which may encode a protein, a protein precursor, or a partially or fully processed form of the protein or a protein precursor. The formulation may have a molar ratio 50:10:38.5:1.5-3.0 (cationic lipid:fusogenic lipid:cholesterol:PEG lipid). The PEG lipid may be selected from, but is not limited to PEG-c-DOMG, PEG-DMG. The fusogenic lipid may be DSPC. See also, Schrum et al., Delivery and Formulation of Engineered Nucleic Acids, US published application 20120251618.

[0680] Nanomerics' technology addresses bioavailability challenges for a broad range of therapeutics, including low molecular weight hydrophobic drugs, peptides, and nucleic acid based therapeutics (plasmid, siRNA, miRNA). Specific administration routes for which the technology has demonstrated clear advantages include the oral route, transport across the blood-brain-barrier, delivery to solid tumours, as well as to the eye. See, e.g., Mazza et al., 2013, ACS Nano. 2013 Feb. 26; 7(2):1016-26; Uchegbu and Siew, 2013, J Pharm Sci. 102(2):305-10 and Lalatsa et al., 2012, J Control Release. 2012 Jul. 20; 161(2):523-36.

[0681] US Patent Publication No. 20050019923 describes cationic dendrimers for delivering bioactive molecules, such as polynucleotide molecules, peptides and polypeptides and/or pharmaceutical agents, to a mammalian body. The dendrimers are suitable for targeting the delivery of the bioactive molecules to, for example, the liver, spleen, lung, kidney or heart (or even the brain). Dendrimers are synthetic 3-dimensional macromolecules that are prepared in a step-wise fashion from simple branched monomer units, the nature and functionality of which can be easily controlled and varied. Dendrimers are synthesised from the repeated addition of building blocks to a multifunctional core (divergent approach to synthesis), or towards a multifunctional core (convergent approach to synthesis) and each addition of a 3-dimensional shell of building blocks leads to the formation of a higher generation of the dendrimers. Polypropylenimine dendrimers start from a diaminobutane core to which is added twice the number of amino groups by a double Michael addition of acrylonitrile to the primary amines followed by the hydrogenation of the nitriles. This results in a doubling of the amino groups. Polypropylenimine dendrimers contain 100% protonable nitrogens and up to 64 terminal amino groups (generation 5, DAB 64). Protonable groups are usually amine groups which are able to accept protons at neutral pH. The use of dendrimers as gene delivery agents has largely focused on the use of the polyamidoamine. and phosphorous containing compounds with a mixture of amine/amide or N—P(O2)S as the conjugating units respectively with no work being reported on the use of the lower generation polypropylenimine dendrimers for gene delivery. Polypropylenimine dendrimers have also been studied as pH sensitive controlled release systems for drug delivery and for their encapsulation of guest molecules when chemically modified by peripheral amino acid groups. The cytotoxicity and interaction of polypropylenimine dendrimers with DNA as well as the transfection efficacy of DAB 64 has also been studied.

[0682] US Patent Publication No. 20050019923 is based upon the observation that, contrary to earlier reports, cationic dendrimers, such as polypropylenimine dendrimers, display suitable properties, such as specific targeting and low toxicity, for use in the targeted delivery of bioactive molecules, such as genetic material. In addition, derivatives of the cationic dendrimer also display suitable properties for the targeted delivery of bioactive molecules. See also, Bioactive Polymers, US published application 20080267903, which discloses “Various polymers, including cationic polyamine polymers and dendrimeric polymers, are shown to possess anti-proliferative activity, and may therefore be useful for treatment of disorders characterised by undesirable cellular proliferation such as neoplasms and tumours, inflammatory disorders (including autoimmune disorders), psoriasis and atherosclerosis. The polymers may be used alone as active agents, or as delivery vehicles for other therapeutic agents, such as drug molecules or nucleic acids for gene therapy. In such cases, the polymers' own intrinsic anti-tumour activity may complement the activity of the agent to be delivered.” The disclosures of these patent publications may be employed in conjunction with herein teachings for delivery of AD-functionalized CRISPR Cas system(s) or component(s) thereof or nucleic acid molecule(s) coding therefor.

### Supercharged Proteins

[0683] Supercharged proteins are a class of engineered or naturally occurring proteins with unusually high positive or negative net theoretical charge and may be employed in delivery of AD-functionalized CRISPR Cas system(s) or component(s) thereof or nucleic acid molecule(s) coding therefor. Both supernegatively and superpositively charged proteins exhibit a remarkable ability to withstand thermally or chemically induced aggregation. Superpositively charged proteins are also able to penetrate mammalian cells. Associating cargo with these proteins, such as plasmid DNA, RNA, or other proteins, can enable the functional delivery of these macromolecules into mammalian cells both in vitro and in vivo. The creation and characterization of supercharged proteins has been reported in 2007 (Lawrence et al., 2007, Journal of the American Chemical Society 129, 10110-10112).

[0684] The nonviral delivery of RNA and plasmid DNA into mammalian cells are valuable both for research and therapeutic applications (Akinc et al., 2010, Nat. Biotech. 26, 561-569). Purified +36 GFP protein (or other superpositively charged protein) is mixed with RNAs in the appropriate serum-free media and allowed to complex prior addition to cells. Inclusion of serum at this stage inhibits formation of the supercharged protein-RNA complexes and reduces the effectiveness of the treatment. The following protocol has been found to be effective for a variety of cell lines (McNaughton et al., 2009, Proc. Natl. Acad. Sci. USA 106, 6111-6116) (However, pilot experiments varying the dose of protein and RNA should be performed to optimize the procedure for specific cell lines): (1) One day before treatment, plate 1×105 cells per well in a 48-well plate. (2) On the day of treatment, dilute purified +36 GFP protein in serumfree media to a final concentration 200 nM. Add RNA to a final concentration of 50 nM. Vortex to mix and incubate at room temperature for 10 min. (3) During incubation, aspirate media from cells and wash once with PBS. (4) Following incubation of +36 GFP and RNA, add the protein-RNA complexes to cells. (5) Incubate cells with complexes at 37° C. for 4 h. (6) Following incubation, aspirate the media and wash three times with 20 U/mL heparin PBS. Incubate cells with serum-containing media for a further 48 h or longer depending upon the assay for activity. (7) Analyze cells by immunoblot, qPCR, phenotypic assay, or other appropriate method.

[0685] It has been further found +36 GFP to be an effective plasmid delivery reagent in a range of cells. As plasmid DNA is a larger cargo than siRNA, proportionately more +36 GFP protein is required to effectively complex plasmids. For effective plasmid delivery Applicants have developed a variant of +36 GFP bearing a C-terminal HA2 peptide tag, a known endosome-disrupting peptide derived from the influenza virus hemagglutinin protein. The following protocol has been effective in a variety of cells, but as above it is advised that plasmid DNA and supercharged protein doses be optimized for specific cell lines and delivery applications: (1) One day before treatment, plate 1×105 per well in a 48-well plate. (2) On the day of treatment, dilute purified [symbol] 36 GFP protein in serumfree media to a final concentration 2 mM. Add 1 mg of plasmid DNA. Vortex to mix and incubate at room temperature for 10 min. (3) During incubation, aspirate media from cells and wash once with PBS. (4) Following incubation of [symbol] 36 GFP and plasmid DNA, gently add the protein-DNA complexes to cells. (5) Incubate cells with complexes at 37 C for 4 h. (6) Following incubation, aspirate the media and wash with PBS. Incubate cells in serum-containing media and incubate for a further 24-48 h. (7) Analyze plasmid delivery (e.g., by plasmid-driven gene expression) as appropriate.

[0686] See also, e.g., McNaughton et al., Proc. Natl. Acad. Sci. USA 106, 6111-6116 (2009); Cronican et al., ACS Chemical Biology 5, 747-752 (2010); Cronican et al., Chemistry & Biology 18, 833-838 (2011); Thompson et al., Methods in Enzymology 503, 293-319 (2012); Thompson, D. B., et al., Chemistry & Biology 19 (7), 831-843 (2012). The methods of the super charged proteins may be used and/or adapted for delivery of the AD-functionalized CRISPR Cas system of the present invention. These systems in conjunction with herein teaching can be employed in the delivery of AD-functionalized CRISPR Cas system(s) or component(s) thereof or nucleic acid molecule(s) coding therefor

### Cell Penetrating Peptides (CPPs)

[0687] In yet another embodiment, cell penetrating peptides (CPPs) are contemplated for the delivery of the AD-functionalized CRISPR Cas system. CPPs are short peptides that facilitate cellular uptake of various molecular cargo (from nanosize particles to small chemical molecules and large fragments of DNA). The term “cargo” as used herein includes but is not limited to the group consisting of therapeutic agents, diagnostic probes, peptides, nucleic acids, antisense oligonucleotides, plasmids, proteins, particles, including nanoparticles, liposomes, chromophores, small molecules and radioactive materials. In aspects of the invention, the cargo may also comprise any component of the AD-functionalized CRISPR Cas system or the entire AD-functionalized functional CRISPR Cas system. Aspects of the present invention further provide methods for delivering a desired cargo into a subject comprising: (a) preparing a complex comprising the cell penetrating peptide of the present invention and a desired cargo, and (b) orally, intraarticularly, intraperitoneally, intrathecally, intrarterially, intranasally, intraparenchymally, subcutaneously, intramuscularly, intravenously, dermally, intrarectally, or topically administering the complex to a subject. The cargo is associated with the peptides either through chemical linkage via covalent bonds or through non-covalent interactions.

[0688] The function of the CPPs are to deliver the cargo into cells, a process that commonly occurs through endocytosis with the cargo delivered to the endosomes of living mammalian cells. Cell-penetrating peptides are of different sizes, amino acid sequences, and charges but all CPPs have one distinct characteristic, which is the ability to translocate the plasma membrane and facilitate the delivery of various molecular cargoes to the cytoplasm or an organelle. CPP translocation may be classified into three main entry mechanisms: direct penetration in the membrane, endocytosis-mediated entry, and translocation through the formation of a transitory structure. CPPs have found numerous applications in medicine as drug delivery agents in the treatment of different diseases including cancer and virus inhibitors, as well as contrast agents for cell labeling. Examples of the latter include acting as a carrier for GFP, MRI contrast agents, or quantum dots. CPPs hold great potential as in vitro and in vivo delivery vectors for use in research and medicine. CPPs typically have an amino acid composition that either contains a high relative abundance of positively charged amino acids such as lysine or arginine or has sequences that contain an alternating pattern of polar/charged amino acids and non-polar, hydrophobic amino acids. These two types of structures are referred to as polycationic or amphipathic, respectively. A third class of CPPs are the hydrophobic peptides, containing only apolar residues, with low net charge or have hydrophobic amino acid groups that are crucial for cellular uptake. One of the initial CPPs discovered was the trans-activating transcriptional activator (Tat) from Human Immunodeficiency Virus 1 (HIV-1) which was found to be efficiently taken up from the surrounding media by numerous cell types in culture. Since then, the number of known CPPs has expanded considerably and small molecule synthetic analogues with more effective protein transduction properties have been generated. CPPs include but are not limited to Penetratin, Tat (48-60), Transportan, and (R-AhX-R4) (Ahx=aminohexanoyl).

[0689] U.S. Pat. No. 8,372,951, provides a CPP derived from eosinophil cationic protein (ECP) which exhibits highly cell-penetrating efficiency and low toxicity. Aspects of delivering the CPP with its cargo into a vertebrate subject are also provided. Further aspects of CPPs and their delivery are described in U.S. Pat. Nos. 8,575,305; 8,614,194 and 8,044,019. CPPs can be used to deliver the AD-functionalized CRISPR-Cas system or components thereof. That CPPs can be employed to deliver the AD-functionalized CRISPR-Cas system or components thereof is also provided in the manuscript “Gene disruption by cell-penetrating peptide-mediated delivery of Cas9 protein and guide RNA”, by Suresh Ramakrishna, Abu-Bonsrah Kwaku Dad, Jagadish Beloor, et al. Genome Res. 2014 Apr. 2, incorporated by reference in its entirety, wherein it is demonstrated that treatment with CPP-conjugated recombinant Cas9 protein and CPP-complexed guide RNAs lead to endogenous gene disruptions in human cell lines. In the paper the Cas9 protein was conjugated to CPP via a thioether bond, whereas the guide RNA was complexed with CPP, forming condensed, positively charged particles. It was shown that simultaneous and sequential treatment of human cells, including embryonic stem cells, dermal fibroblasts, HEK293T cells, HeLa cells, and embryonic carcinoma cells, with the modified Cas9 and guide RNA led to efficient gene disruptions with reduced off-target mutations relative to plasmid transfections.

### Aerosol Delivery

[0690] Subjects treated for a lung disease may for example receive pharmaceutically effective amount of aerosolized AAV vector system per lung endobronchially delivered while spontaneously breathing. As such, aerosolized delivery is preferred for AAV delivery in general. An adenovirus or an AAV particle may be used for delivery. Suitable gene constructs, each operably linked to one or more regulatory sequences, may be cloned into the delivery vector.

### Packaging and Promoters

[0691] The promoter used to drive CRISPR-Cas protein and nucleotide deaminase coding nucleic acid molecule expression can include AAV ITR, which can serve as a promoter. This is advantageous for eliminating the need for an additional promoter element (which can take up space in the vector). The additional space freed up can be used to drive the expression of additional elements (gRNA, etc.). Also, ITR activity is relatively weaker, so can be used to reduce potential toxicity due to over expression of Cas13.

[0692] For ubiquitous expression, promoters that can be used include: CMV, CAG, CBh, PGK, SV40, Ferritin heavy or light chains, etc. For brain or other CNS expression, SynapsinI can be used for all neurons, CaMKIIalpha can be used for excitatory neurons, GAD67 or GAD65 or VGAT can be used for GABAergic neurons. For liver expression, Albumin promoter can be used. For lung expression, SP-B can be used. For endothelial cells, ICAM can be used. For hematopoietic cells, IFNbeta or CD45 can be used. For Osteoblasts, the OG-2 can be used.

[0693] The promoter used to drive guide RNA can include Pol III promoters such as U6 or H1, as well as use of Pol II promoter and intronic cassettes to express guide RNA.

### Adeno Associated Virus (AAV)

[0694] The CRISPR-Cas protein, nucleotide deaminase, and one or more guide RNA can be delivered using adeno associated virus (AAV), lentivirus, adenovirus or other plasmid or viral vector types, in particular, using formulations and doses from, for example, U.S. Pat. No. 8,454,972 (formulations, doses for adenovirus), 8,404,658 (formulations, doses for AAV) and U.S. Pat. No. 5,846,946 (formulations, doses for DNA plasmids) and from clinical trials and publications regarding the clinical trials involving lentivirus, AAV and adenovirus. For examples, for AAV, the route of administration, formulation and dose can be as in U.S. Pat. No. 8,454,972 and as in clinical trials involving AAV. For Adenovirus, the route of administration, formulation and dose can be as in U.S. Pat. No. 8,404,658 and as in clinical trials involving adenovirus. For plasmid delivery, the route of administration, formulation and dose can be as in U.S. Pat. No. 5,846,946 and as in clinical studies involving plasmids. Doses may be based on or extrapolated to an average 70 kg individual (e.g. a male adult human), and can be adjusted for patients, subjects, mammals of different weight and species. Frequency of administration is within the ambit of the medical or veterinary practitioner (e.g., physician, veterinarian), depending on usual factors including the age, sex, general health, other conditions of the patient or subject and the particular condition or symptoms being addressed. The viral vectors can be injected into the tissue of interest. For cell-type specific genome modification, the expression of Cas13 and nucleotide deaminase can be driven by a cell-type specific promoter. For example, liver-specific expression might use the Albumin promoter and neuron-specific expression (e.g. for targeting CNS disorders) might use the Synapsin I promoter.

[0695] In terms of in vivo delivery, AAV is advantageous over other viral vectors for a couple of reasons: low toxicity (this may be due to the purification method not requiring ultra centrifugation of cell particles that can activate the immune response); and low probability of causing insertional mutagenesis because it doesn't integrate into the host genome.

[0696] AAV has a packaging limit of 4.5 or 4.75 Kb. This means that Cas13 as well as a promoter and transcription terminator have to be all fit into the same viral vector. Constructs larger than 4.5 or 4.75 Kb will lead to significantly reduced virus production. SpCas9 is quite large, the gene itself is over 4.1 Kb, which makes it difficult for packing into AAV. Therefore embodiments of the invention include utilizing homologs of Cas13 that are shorter.

[0697] As to AAV, the AAV can be AAV1, AAV2, AAV5 or any combination thereof. One can select the AAV of the AAV with regard to the cells to be targeted; e.g., one can select AAV serotypes 1, 2, 5 or a hybrid capsid AAV 1, AAV2, AAV5 or any combination thereof for targeting brain or neuronal cells; and one can select AAV4 for targeting cardiac tissue. AAV8 is useful for delivery to the liver. The herein promoters and vectors are preferred individually. A tabulation of certain AAV serotypes as to these cells (see Grimm, D. et al, J. Virol. 82: 5887-5911 (2008)) is as follows:

| Cell Line | AAV-1 | AAV-2 | AAV-3 | AAV-4 | AAV-5 | AAV-6 | AAV-8 | AAV-9 |
|---|---|---|---|---|---|---|---|---|
| Huh-7 | 13 | 100 | 2.5 | 0.0 | 0.1 | 10 | 0.7 | 0.0 |
| HEK293 | 25 | 100 | 2.5 | 0.1 | 0.1 | 5 | 0.7 | 0.1 |
| HeLa | 3 | 100 | 2.0 | 0.1 | 6.7 | 1 | 0.2 | 0.1 |
| HepG2 | 3 | 100 | 16.7 | 0.3 | 1.7 | 5 | 0.3 | ND |
| Hep1A | 20 | 100 | 0.2 | 1.0 | 0.1 | 1 | 0.2 | 0.0 |
| 911 | 17 | 100 | 11 | 0.2 | 0.1 | 17 | 0.1 | ND |
| CHO | 100 | 100 | 14 | 1.4 | 333 | 50 | 10 | 1.0 |
| COS | 33 | 100 | 33 | 3.3 | 5.0 | 14 | 2.0 | 0.5 |
| MeWo | 10 | 100 | 20 | 0.3 | 6.7 | 10 | 1.0 | 0.2 |
| NIH3T3 | 10 | 100 | 2.9 | 2.9 | 0.3 | 10 | 0.3 | ND |
| A549 | 14 | 100 | 20 | ND | 0.5 | 10 | 0.5 | 0.1 |
| HT1180 | 20 | 100 | 10 | 0.1 | 0.3 | 33 | 0.5 | 0.1 |
| Monocytes | 1111 | 100 | ND | ND | 125 | 1429 | ND | ND |
| Immature DC | 2500 | 100 | ND | ND | 222 | 2857 | ND | ND |
| Mature DC | 2222 | 100 | ND | ND | 333 | 3333 | ND | ND |

### Lentiviruses

[0698] Lentiviruses are complex retroviruses that have the ability to infect and express their genes in both mitotic and post-mitotic cells. The most commonly known lentivirus is the human immunodeficiency virus (HIV), which uses the envelope glycoproteins of other viruses to target a broad range of cell types.

[0699] Lentiviruses may be prepared as follows. After cloning pCasES10 (which contains a lentiviral transfer plasmid backbone), HEK293FT at low passage (p=5) were seeded in a T-75 flask to 50% confluence the day before transfection in DMEM with 10% fetal bovine serum and without antibiotics. After 20 hours, media was changed to OptiMEM (serum-free) media and transfection was done 4 hours later. Cells were transfected with 10 μg of lentiviral transfer plasmid (pCasES10) and the following packaging plasmids: 5 μg of pMD2.G (VSV-g pseudotype), and 7.5 ug of psPAX2 (gag/pol/rev/tat). Transfection was done in 4 mL OptiMEM with a cationic lipid delivery agent (50 uL Lipofectamine 2000 and 100 ul Plus reagent). After 6 hours, the media was changed to antibiotic-free DMEM with 10% fetal bovine serum. These methods use serum during cell culture, but serum-free methods are preferred.

[0700] Lentivirus may be purified as follows. Viral supernatants were harvested after 48 hours. Supernatants were first cleared of debris and filtered through a 0.45 um low protein binding (PVDF) filter. They were then spun in a ultracentrifuge for 2 hours at 24,000 rpm. Viral pellets were resuspended in 50 ul of DMEM overnight at 4C. They were then aliquoted and immediately frozen at −80° C.

[0701] In another embodiment, minimal non-primate lentiviral vectors based on the equine infectious anemia virus (EIAV) are also contemplated, especially for ocular gene therapy (see, e.g., Balagaan, J Gene Med 2006; 8: 275-285). In another embodiment, RetinoStat®, an equine infectious anemia virus-based lentiviral gene therapy vector that expresses angiostatic proteins endostatin and angiostatin that is delivered via a subretinal injection for the treatment of the web form of age-related macular degeneration is also contemplated (see, e.g., Binley et al., HUMAN GENE THERAPY 23:980-991 (September 2012)) and this vector may be modified for the AD-functionalized CRISPR-Cas system of the present invention.

[0702] In another embodiment, self-inactivating lentiviral vectors with an siRNA targeting a common exon shared by HIV tat/rev, a nucleolar-localizing TAR decoy, and an anti-CCR5-specific hammerhead ribozyme (see, e.g., DiGiusto et al. (2010) Sci Transl Med 2:36ra43) may be used/and or adapted to the AD-functionalized CRISPR-Cas system of the present invention. A minimum of 2.5×106 CD34+ cells per kilogram patient weight may be collected and prestimulated for 16 to 20 hours in X-VIVO 15 medium (Lonza) containing 2 μmon-glutamine, stem cell factor (100 ng/ml), Flt-3 ligand (Flt-3L) (100 ng/ml), and thrombopoietin (10 ng/ml) (CellGenix) at a density of 2×106 cells/ml. Prestimulated cells may be transduced with lentiviral at a multiplicity of infection of 5 for 16 to 24 hours in 75-cm2 tissue culture flasks coated with fibronectin (25 mg/cm2) (RetroNectin, Takara Bio Inc.).

[0703] Lentiviral vectors have been disclosed as in the treatment for Parkinson's Disease, see, e.g., US Patent Publication No. 20120295960 and U.S. Pat. Nos. 7,303,910 and 7,351,585. Lentiviral vectors have also been disclosed for the treatment of ocular diseases, see e.g., US Patent Publication Nos. 20060281180, 20090007284, US20110117189; US20090017543; US20070054961, US20100317109. Lentiviral vectors have also been disclosed for delivery to the brain, see, e.g., US Patent Publication Nos. US20110293571; US20110293571, US20040013648, US20070025970, US20090111106 and U.S. Pat. No. 7,259,015.

### Applications

[0704] The systems and methods have applications in various organisms and cells, tissues, or organs thereof. In certain cases, the target sequence (e.g., target RNA sequence) may be within a cell. The cell may be a eukaryotic cell. For example, the eukaryotic cell may be human cell, a non-human animal cell, a plant cell, or a fungal cell. In certain case, the cell may be a prokaryotic cell, e.g., a bacterial cell.

[0705] The systems and methods may be used for making modification(s) on a target sequence where the modification(s) affects the fertility of an organism, modification affects splicing of said target RNA sequence, introduces a mutation in a transcript introducing an amino acid change and causing expression of a new antigen in a cancer cell. In some cases, the deamination of an Adenine in a target RNA of interest causes a gain of function or a loss of function of a gene. In some cases, the modification increases or decreases a half-life of a target protein by modifying a degron encoded by the target nucleic acid sequence

[0706] As will be apparent, it is envisaged that the systems (e.g., AD-functionalized CRISPR system) can be used to target any polynucleotide sequence of interest. The invention provides a non-naturally occurring or engineered composition, or one or more polynucleotides encoding components of said composition, or vector or delivery systems comprising one or more polynucleotides encoding components of said composition for use in a modifying a target cell in vivo, ex vivo or in vitro and, may be conducted in a manner alters the cell such that once modified the progeny or cell line of the CRISPR modified cell retains the altered phenotype. The modified cells and progeny may be part of a multi-cellular organism such as a plant or animal with ex vivo or in vivo application of CRISPR system to desired cell types. The CRISPR invention may be a therapeutic method of treatment. The therapeutic method of treatment may comprise gene or genome editing, or gene therapy. In the context of prophylactic or therapeutic treatment, the target locus/sequence of interest may be within a human or animal.

### Adoptive Cell Therapies

[0707] The present invention also contemplates use of the AD-functionalized CRISPR system described herein to modify cells for adoptive therapies. The systems and methods herein may be used for cell therapy. Aspects of the invention accordingly involve the adoptive transfer of immune system cells, such as T cells, specific for selected antigens, such as tumor associated antigens (see Maus et al., 2014, Adoptive Immunotherapy for Cancer or Viruses, Annual Review of Immunology, Vol. 32: 189-225; Rosenberg and Restifo, 2015, Adoptive cell transfer as personalized immunotherapy for human cancer, Science Vol. 348 no. 6230 pp. 62-68; and, Restifo et al., 2015, Adoptive immunotherapy for cancer: harnessing the T cell response. Nat. Rev. Immunol. 12(4): 269-281; and Jenson and Riddell, 2014, Design and implementation of adoptive therapy with chimeric antigen receptor-modified T cells. Immunol Rev. 257(1): 127-144). Various strategies may for example be employed to genetically modify T cells by altering the specificity of the T cell receptor (TCR) for example by introducing new TCR α and β chains with selected peptide specificity (see U.S. Pat. No. 8,697,854; PCT Patent Publications: WO2003020763, WO2004033685, WO2004044004, WO2005114215, WO2006000830, WO2008038002, WO2008039818, WO2004074322, WO2005113595, WO2006125962, WO2013166321, WO2013039889, WO2014018863, WO2014083173; U.S. Pat. No. 8,088,379).

[0708] As an alternative to, or addition to, TCR modifications, chimeric antigen receptors (CARs) may be used in order to generate immunoresponsive cells, such as T cells, specific for selected targets, such as malignant cells, with a wide variety of receptor chimera constructs having been described (see U.S. Pat. Nos. 5,843,728; 5,851,828; 5,912,170; 6,004,811; 6,284,240; 6,392,013; 6,410,014; 6,753,162; 8,211,422; and, PCT Publication WO9215322). Alternative CAR constructs may be characterized as belonging to successive generations. First-generation CARs typically consist of a single-chain variable fragment of an antibody specific for an antigen, for example comprising a VL linked to a VH of a specific antibody, linked by a flexible linker, for example by a CD8a hinge domain and a CD8a transmembrane domain, to the transmembrane and intracellular signaling domains of either CD3 or FcRγ (scFv-CD3ζ or scFv-FcRγ; see U.S. Pat. Nos. 7,741,465; 5,912,172; 5,906,936). Second-generation CARs incorporate the intracellular domains of one or more costimulatory molecules, such as CD28, OX40 (CD134), or 4-1BB (CD137) within the endodomain (for example scFv-CD28/0X40/4-1BB-CD3ζ; see U.S. Pat. Nos. 8,911,993; 8,916,381; 8,975,071; 9,101,584; 9,102,760; 9,102,761). Third-generation CARs include a combination of costimulatory endodomains, such a CD3-chain, CD97, GDI la-CD18, CD2, ICOS, CD27, CD154, CDS, OX40, 4-1BB, or CD28 signaling domains (for example scFv-CD28-4-1BB-CD3ζ or scFv-CD28-OX40-CD3; see U.S. Pat. Nos. 8,906,682; 8,399,645; 5,686,281; PCT Publication No.

[0709] WO2014134165; PCT Publication No. WO2012079000). Alternatively, costimulation may be orchestrated by expressing CARs in antigen-specific T cells, chosen so as to be activated and expanded following engagement of their native αβTCR, for example by antigen on professional antigen-presenting cells, with attendant costimulation. In addition, additional engineered receptors may be provided on the immunoresponsive cells, for example to improve targeting of a T-cell attack and/or minimize side effects.

[0710] Alternative techniques may be used to transform target immunoresponsive cells, such as protoplast fusion, lipofection, transfection or electroporation. A wide variety of vectors may be used, such as retroviral vectors, lentiviral vectors, adenoviral vectors, adeno-associated viral vectors, plasmids or transposons, such as a Sleeping Beauty transposon (see U.S. Pat. Nos. 6,489,458; 7,148,203; 7,160,682; 7,985,739; 8,227,432), may be used to introduce CARs, for example using 2nd generation antigen-specific CARs signaling through CD3ζ and either CD28 or CD137. Viral vectors may for example include vectors based on HIV, SV40, EBV, HSV or BPV.

[0711] Cells that are targeted for transformation may for example include T cells, Natural Killer (NK) cells, cytotoxic T lymphocytes (CTL), regulatory T cells, human embryonic stem cells, tumor-infiltrating lymphocytes (TIL) or a pluripotent stem cell from which lymphoid cells may be differentiated. T cells expressing a desired CAR may for example be selected through co-culture with γ-irradiated activating and propagating cells (AaPC), which co-express the cancer antigen and co-stimulatory molecules. The engineered CAR T-cells may be expanded, for example by co-culture on AaPC in presence of soluble factors, such as IL-2 and IL-21. This expansion may for example be carried out so as to provide memory CAR+ T cells (which may for example be assayed by non-enzymatic digital array and/or multi-panel flow cytometry). In this way, CAR T cells may be provided that have specific cytotoxic activity against antigen-bearing tumors (optionally in conjunction with production of desired chemokines such as interferon-γ). CART cells of this kind may for example be used in animal models, for example to threat tumor xenografts.

[0712] Approaches such as the foregoing may be adapted to provide methods of treating and/or increasing survival of a subject having a disease, such as a neoplasia, for example by administering an effective amount of an immunoresponsive cell comprising an antigen recognizing receptor that binds a selected antigen, wherein the binding activates the immunoreponsive cell, thereby treating or preventing the disease (such as a neoplasia, a pathogen infection, an autoimmune disorder, or an allogeneic transplant reaction). Dosing in CAR T cell therapies may for example involve administration of from 106 to 109 cells/kg, with or without a course of lymphodepletion, for example with cyclophosphamide.

[0713] In one embodiment, the treatment can be administrated into patients undergoing an immunosuppressive treatment. The cells or population of cells, may be made resistant to at least one immunosuppressive agent due to the inactivation of a gene encoding a receptor for such immunosuppressive agent. Not being bound by a theory, the immunosuppressive treatment should help the selection and expansion of the immunoresponsive or T cells according to the invention within the patient.

[0714] The administration of the cells or population of cells according to the present invention may be carried out in any convenient manner, including by aerosol inhalation, injection, ingestion, transfusion, implantation or transplantation. The cells or population of cells may be administered to a patient subcutaneously, intradermally, intratumorally, intranodally, intramedullary, intramuscularly, by intravenous or intralymphatic injection, or intraperitoneally. In one embodiment, the cell compositions of the present invention are preferably administered by intravenous injection.

[0715] The administration of the cells or population of cells can consist of the administration of 104-109 cells per kg body weight, preferably 105 to 106 cells/kg body weight including all integer values of cell numbers within those ranges. Dosing in CAR T cell therapies may for example involve administration of from 106 to 109 cells/kg, with or without a course of lymphodepletion, for example with cyclophosphamide. The cells or population of cells can be administrated in one or more doses. In another embodiment, the effective amount of cells are administrated as a single dose. In another embodiment, the effective amount of cells are administrated as more than one dose over a period time. Timing of administration is within the judgment of managing physician and depends on the clinical condition of the patient. The cells or population of cells may be obtained from any source, such as a blood bank or a donor. While individual needs vary, determination of optimal ranges of effective amounts of a given cell type for a particular disease or conditions are within the skill of one in the art. An effective amount means an amount which provides a therapeutic or prophylactic benefit. The dosage administrated will be dependent upon the age, health and weight of the recipient, kind of concurrent treatment, if any, frequency of treatment and the nature of the effect desired.

[0716] In another embodiment, the effective amount of cells or composition comprising those cells are administrated parenterally. The administration can be an intravenous administration. The administration can be directly done by injection within a tumor.

[0717] To guard against possible adverse reactions, engineered immunoresponsive cells may be equipped with a transgenic safety switch, in the form of a transgene that renders the cells vulnerable to exposure to a specific signal. For example, the herpes simplex viral thymidine kinase (TK) gene may be used in this way, for example by introduction into allogeneic T lymphocytes used as donor lymphocyte infusions following stem cell transplantation (Greco, et al., Improving the safety of cell therapy with the TK-suicide gene. Front. Pharmacol. 2015; 6: 95). In such cells, administration of a nucleoside prodrug such as ganciclovir or acyclovir causes cell death. Alternative safety switch constructs include inducible caspase 9, for example triggered by administration of a small-molecule dimerizer that brings together two nonfunctional icasp9 molecules to form the active enzyme. A wide variety of alternative approaches to implementing cellular proliferation controls have been described (see U.S. Patent Publication No. 20130071414; PCT Patent Publication WO2011146862; PCT Patent Publication WO2014011987; PCT Patent Publication WO2013040371; Zhou et al. BLOOD, 2014, 123/25:3895-3905; Di Stasi et al., The New England Journal of Medicine 2011; 365:1673-1683; Sadelain M, The New England Journal of Medicine 2011; 365:1735-173; Ramos et al., Stem Cells 28(6):1107-15 (2010)).

[0718] In a further refinement of adoptive therapies, genome editing with a AD-functionalized CRISPR-Cas system as described herein may be used to tailor immunoresponsive cells to alternative implementations, for example providing edited CAR T cells (see Poirot et al., 2015, Multiplex genome edited T-cell manufacturing platform for “off-the-shelf” adoptive T-cell immunotherapies, Cancer Res 75 (18): 3853). For example, immunoresponsive cells may be edited to delete expression of some or all of the class of HLA type II and/or type I molecules, or to knockout selected genes that may inhibit the desired immune response, such as the PD1 gene.

[0719] Cells may be edited using a AD-functionalized CRISPR system as described herein. AD-functionalized CRISPR systems may be delivered to an immune cell by any method described herein. In preferred embodiments, cells are edited ex vivo and transferred to a subject in need thereof. Immunoresponsive cells, CAR-T cells or any cells used for adoptive cell transfer may be edited. Editing may be performed to eliminate potential alloreactive T-cell receptors (TCR), disrupt the target of a chemotherapeutic agent, block an immune checkpoint, activate a T cell, and/or increase the differentiation and/or proliferation of functionally exhausted or dysfunctional CD8+ T-cells (see PCT Patent Publications: WO2013176915, WO2014059173, WO2014172606, WO2014184744, and WO2014191128). Editing may result in inactivation of a gene.

[0720] T cell receptors (TCR) are cell surface receptors that participate in the activation of T cells in response to the presentation of antigen. The TCR is generally made from two chains, a and β, which assemble to form a heterodimer and associates with the CD3-transducing subunits to form the T cell receptor complex present on the cell surface. Each α and β chain of the TCR consists of an immunoglobulin-like N-terminal variable (V) and constant (C) region, a hydrophobic transmembrane domain, and a short cytoplasmic region. As for immunoglobulin molecules, the variable region of the α and β chains are generated by V(D)J recombination, creating a large diversity of antigen specificities within the population of T cells. However, in contrast to immunoglobulins that recognize intact antigen, T cells are activated by processed peptide fragments in association with an MHC molecule, introducing an extra dimension to antigen recognition by T cells, known as MHC restriction. Recognition of MHC disparities between the donor and recipient through the T cell receptor leads to T cell proliferation and the potential development of graft versus host disease (GVHD). The inactivation of TCRα or TCRβ can result in the elimination of the TCR from the surface of T cells preventing recognition of alloantigen and thus GVHD. However, TCR disruption generally results in the elimination of the CD3 signaling component and alters the means of further T cell expansion.

[0721] Allogeneic cells are rapidly rejected by the host immune system. It has been demonstrated that, allogeneic leukocytes present in non-irradiated blood products will persist for no more than 5 to 6 days (Boni, Muranski et al. 2008 Blood 1; 112(12):4746-54). Thus, to prevent rejection of allogeneic cells, the host's immune system usually has to be suppressed to some extent. However, in the case of adoptive cell transfer the use of immunosuppressive drugs also have a detrimental effect on the introduced therapeutic T cells. Therefore, to effectively use an adoptive immunotherapy approach in these conditions, the introduced cells would need to be resistant to the immunosuppressive treatment. Thus, in a particular embodiment, the present invention further comprises a step of modifying T cells to make them resistant to an immunosuppressive agent, preferably by inactivating at least one gene encoding a target for an immunosuppressive agent. An immunosuppressive agent is an agent that suppresses immune function by one of several mechanisms of action. An immunosuppressive agent can be, but is not limited to a calcineurin inhibitor, a target of rapamycin, an interleukin-2 receptor α-chain blocker, an inhibitor of inosine monophosphate dehydrogenase, an inhibitor of dihydrofolic acid reductase, a corticosteroid or an immunosuppressive antimetabolite. The present invention allows conferring immunosuppressive resistance to T cells for immunotherapy by inactivating the target of the immunosuppressive agent in T cells. As non-limiting examples, targets for an immunosuppressive agent can be a receptor for an immunosuppressive agent such as: CD52, glucocorticoid receptor (GR), a FKBP family gene member and a cyclophilin family gene member.

[0722] Immune checkpoints are inhibitory pathways that slow down or stop immune reactions and prevent excessive tissue damage from uncontrolled activity of immune cells. In certain embodiments, the immune checkpoint targeted is the programmed death-1 (PD-1 or CD279) gene (PDCD1). In other embodiments, the immune checkpoint targeted is cytotoxic T-lymphocyte-associated antigen (CTLA-4). In additional embodiments, the immune checkpoint targeted is another member of the CD28 and CTLA4 Ig superfamily such as BTLA, LAG3, ICOS, PDL1 or KIR. In further additional embodiments, the immune checkpoint targeted is a member of the TNFR superfamily such as CD40, OX40, CD137, GITR, CD27 or TIM-3.

[0723] Additional immune checkpoints include Src homology 2 domain-containing protein tyrosine phosphatase 1 (SHP-1) (Watson H A, et al., SHP-1: the next checkpoint target for cancer immunotherapy? Biochem Soc Trans. 2016 Apr. 15; 44(2):356-62). SHP-1 is a widely expressed inhibitory protein tyrosine phosphatase (PTP). In T-cells, it is a negative regulator of antigen-dependent activation and proliferation. It is a cytosolic protein, and therefore not amenable to antibody-mediated therapies, but its role in activation and proliferation makes it an attractive target for genetic manipulation in adoptive transfer strategies, such as chimeric antigen receptor (CAR) T cells. Immune checkpoints may also include T cell immunoreceptor with Ig and ITIM domains (TIGIT/Vstm3/WUCAM/VSIG9) and VISTA (Le Mercier I, et al., (2015) Beyond CTLA-4 and PD-1, the generation Z of negative checkpoint regulators. Front. Immunol. 6:418).

[0724] WO2014172606 relates to the use of MT1 and/or MT1 inhibitors to increase proliferation and/or activity of exhausted CD8+ T-cells and to decrease CD8+ T-cell exhaustion (e.g., decrease functionally exhausted or unresponsive CD8+ immune cells). In certain embodiments, metallothioneins are targeted by gene editing in adoptively transferred T cells.

[0725] In certain embodiments, targets of gene editing may be at least one targeted locus involved in the expression of an immune checkpoint protein. Such targets may include, but are not limited to CTLA4, PPP2CA, PPP2CB, PTPN6, PTPN22, PDCD1, ICOS (CD278), PDL1, KIR, LAG3, HAVCR2, BTLA, CD160, TIGIT, CD96, CRTAM, LAIR1, SIGLEC7, SIGLEC9, CD244 (2B4), TNFRSF10B, TNFRSF10A, CASP8, CASP10, CASP3, CASP6, CASP7, FADD, FAS, TGFBRII, TGFRBRI, SMAD2, SMAD3, SMAD4, SMAD10, SKI, SKIL, TGIF1, IL10RA, IL10RB, HMOX2, IL6R, IL6ST, EIF2AK4, CSK, PAG1, SIT1, FOXP3, PRDM1, BATF, VISTA, GUCY1A2, GUCY1A3, GUCY1B2, GUCY1B3, MT1, MT2, CD40, OX40, CD137, GITR, CD27, SHP-1 or TIM-3. In preferred embodiments, the gene locus involved in the expression of PD-1 or CTLA-4 genes is targeted. In other preferred embodiments, combinations of genes are targeted, such as but not limited to PD-1 and TIGIT.

[0726] In other embodiments, at least two genes are edited. Pairs of genes may include, but are not limited to PD1 and TCRα, PD1 and TCRβ, CTLA-4 and TCRα, CTLA-4 and TCRβ, LAG3 and TCRα, LAG3 and TCRβ, Tim3 and TCRα, Tim3 and TCRβ, BTLA and TCRα, BTLA and TCRβ, BY55 and TCRα, BY55 and TCRβ, TIGIT and TCRα, TIGIT and TCRβ, B7H5 and TCRα, B7H5 and TCRβ, LAIR1 and TCRα, LAIR1 and TCRβ, SIGLEC10 and TCRα, SIGLEC10 and TCRβ, 2B4 and TCRα, 2B4 and TCRβ.

[0727] Whether prior to or after genetic modification of the T cells, the T cells can be activated and expanded generally using methods as described, for example, in U.S. Pat. Nos. 6,352,694; 6,534,055; 6,905,680; 5,858,358; 6,887,466; 6,905,681; 7,144,575; 7,232,566; 7,175,843; 5,883,223; 6,905,874; 6,797,514; 6,867,041; and 7,572,631. T cells can be expanded in vitro or in vivo.

[0728] The practice of the present invention employs techniques known in the field of immunology, biochemistry, chemistry, molecular biology, microbiology, cell biology, genomics and recombinant DNA, which are within the skill of the art. See MOLECULAR CLONING: A LABORATORY MANUAL, 2nd edition (1989) (Sambrook, Fritsch and Maniatis); MOLECULAR CLONING: A LABORATORY MANUAL, 4th edition (2012) (Green and Sambrook); CURRENT PROTOCOLS IN MOLECULAR BIOLOGY (1987) (F. M. Ausubel, et al. eds.); the series METHODS IN ENZYMOLOGY (Academic Press, Inc.); PCR 2: A PRACTICAL APPROACH (1995) (M.J. MacPherson, B.D. Hames and G.R. Taylor eds.); ANTIBODIES, A LABORATORY MANUAL (1988) (Harlow and Lane, eds.); ANTIBODIES A LABORATORY MANUAL, 2nd edition (2013) (E.A. Greenfield ed.); and ANIMAL CELL CULTURE (1987) (R.I. Freshney, ed.).

### Correction of Disease-Associated Mutations and Pathogenic SNPs

[0729] In one aspect, the invention described herein provides methods for modifying an nucleotide residue at a target locus with the aim of remedying and/or preventing a diseased condition that is or is likely to be caused by a G-to-A or C-to-T point mutation or a pathogenic single nucleotide polymorphism (SNP).

[0730] Examples of such disease include Meier-Gorlin syndrome, Seckel syndrome 4, Joubert syndrome 5, Leber congenital amaurosis 10; Charcot-Marie-Tooth disease, type 2; Charcot-Marie-Tooth disease, type 2; Usher syndrome, type 2C; Spinocerebellar ataxia 28; Spinocerebellar ataxia 28; Spinocerebellar ataxia 28; Long QT syndrome 2; Sjögren-Larsson syndrome; Hereditary fructosuria; Hereditary fructosuria; Neuroblastoma; Neuroblastoma; Kallmann syndrome 1; Kallmann syndrome 1; Kallmann syndrome 1; Metachromatic leukodystrophy, Rett syndrome, Amyotrophic lateral sclerosis type 10, Li-Fraumeni syndrome, or a disease listed in Table 5; or the disease is a premature termination disease or cancer.

### Diseases Affecting the Brain and Central Nervous System

[0731] Pathogenic G-to-A or C-to-T mutations/SNPs associated with various diseases affecting the brain and central nervous system are reported in the ClinVar database and disclosed in Table A, including but not limited to Alzheimer's Disease, Parkinson's Disease, Autism, Amyotrophyic lateral sclerosis (ALS), Schizophrenia, Adrenoleukodystrophy, Aicardi Goutieres syndrome, Fabry disease, Lesch-Nyhan syndrome, and Menkes Disease. Accordingly, an aspect of the invention relates to a method for correcting one or more pathogenic G-to-A or C-to-T mutations/SNPs associated with any of these diseases, as discussed below.

### Alzheimer's Disease

[0732] In some embodiments, the methods, systems, and compositions described herein are used to correct one or more pathogenic G-to-A or C-to-T mutations/SNPs associated with Alzheimer's Disease. In some embodiments, the pathogenic mutations/SNPs are present in at least one gene selected from PSEN1, PSEN2, and APP, including at least the followings:

### NM_000021.3(PSEN1):c.796G>A (p.Gly266Ser)

### NM_000484.3(APP):c.2017G>A (p.Ala673Thr)

### NM_000484.3(APP):c.2149G>A (p.Val717Ile)

### NM_000484.3(APP):c.2137G>A (p.Ala713Thr)

### NM_000484.3(APP):c.2143G>A (p.Val715Met)

[0733] NM_000484.3(APP):c.2141C>T (p. Thr714Ile)

### NM_000021.3(PSEN1):c.438G>A (p.Met146Ile)

### NM_000021.3(PSEN1):c.1229G>A (p.Cys410Tyr)

### NM_000021.3(PSEN1):c.487C>T (p.His163Tyr)

### NM_000021.3(PSEN1):c.799C>T (p.Pro267Ser)

### NM_000021.3(PSEN1):c.236C>T (p.Ala79Val)

### NM_000021.3(PSEN1):c.509C>T (p.Ser170Phe)

### NM_000447.2(PSEN2):c.1289C>T (p.Thr430Met)

### NM_000447.2(PSEN2):c.717G>A (p.Met239Ile)

### NM_000447.2(PSEN2):c.254C>T (p.Ala85Val)

### NM_000021.3(PSEN1):c.806G>A (p.Arg269His)

### NM_000484.3(APP):c.2018C>T (p.Ala673Val).

[0734] See Table A. Accordingly, an aspect of the invention relates to a method for treating or preventing Alzheimer's Disease by correcting one or more pathogenic G-to-A or C-to-T mutations/SNPs, particularly one or more pathogenic G-to-A or C-to-T mutations/SNPs present in at least one gene selected from PSEN1, PSEN2, and APP, and more particularly one or more pathogenic G-to-A or C-to-T mutations/SNPs described above.

### Parkinson's Disease

[0735] In some embodiments, the methods, systems, and compositions described herein are used to correct one or more pathogenic G-to-A or C-to-T mutations/SNPs associated with Parkinson's Disease. In some embodiments, In some embodiment, the pathogenic mutations/SNPs are present in at least one gene selected from SNCA, PLA2G6, FBXO7, VPS35, EIF4G1, DNAJC6, PRKN, SYNJ1, CHCHD2, PINK1, PARK7, LRRK2, ATP13A2, and GBA, including at least the followings:

### NM_000345.3(SNCA):c.157G>A (p.Ala53Thr)

### NM_000345.3(SNCA):c.152G>A (p.Gly51Asp)

### NM_003560.3(PLA2G6):c.2222G>A (p.Arg741Gln)

### NM_003560.3(PLA2G6):c.2239C>T (p.Arg747Trp)

### NM_003560.3(PLA2G6):c.1904G>A (p.Arg635Gln)

### NM_003560.3(PLA2G6):c.1354C>T (p.Gln452Ter)

### NM_012179.3(FBXO7):c.1492C>T (p.Arg498Ter)

### NM_012179.3(FBXO7):c.65C>T (p.Thr22Met)

### NM_018206.5(VPS35):c.1858G>A (p.Asp620Asn)

### NM_198241.2(EIF4G1):c.3614G>A (p.Arg1205His)

### NM_198241.2(EIF4G1):c.1505C>T (p.Ala502Val)

### NM_001256865.1(DNAJC6):c.2200C>T (p.Gln734Ter)

### NM_001256865.1(DNAJC6):c.2326C>T (p.Gln776Ter)

### NM_004562.2(PRKN):c.931C>T (p.Gln311Ter)

### NM_004562.2(PRKN):c.1358G>A (p.Trp453Ter)

### NM_004562.2(PRKN):c.635G>A (p.Cys212Tyr)

### NM_203446.2(SYNJ1):c.773G>A (p.Arg258Gln)

### NM_001320327.1(CHCHD2):c.182C>T (p.Thr61Ile)

### NM_001320327.1(CHCHD2):c.434G>A (p.Arg145Gln)

### NM_001320327.1(CHCHD2):c.300+5G>A

### NM_032409.2(PINK1):c.926G>A (p.Gly309Asp)

### NM_032409.2(PINK1):c.1311G>A (p.Trp437Ter)

### NM_032409.2(PINK1):c.736C>T (p.Arg246Ter)

### NM_032409.2(PINK1):c.836G>A (p.Arg279His)

### NM_032409.2(PINK1):c.938C>T (p.Thr313Met)

### NM_032409.2(PINK1):c.1366C>T (p.Gln456Ter)

### NM_007262.4(PARK7):c.78G>A (p.Met26Ile)

### NM_198578.3(LRRK2):c.4321C>T (p.Arg1441Cys)

### NM_198578.3(LRRK2):c.4322G>A (p.Arg1441His)

### NM_198578.3(LRRK2):c.1256C>T (p.Ala419Val)

### NM_198578.3(LRRK2):c.6055G>A (p.Gly2019Ser)

### NM_022089.3(ATP13A2):c.1306+5G>A

### NM_022089.3(ATP13A2):c.2629G>A (p.Gly877Arg)

### NM_022089.3(ATP13A2):c.490C>T (p.Arg164Trp)

### NM_001005741.2(GBA):c.1444G>A (p.Asp482Asn) m.15950G>A.

[0736] See Table A. Accordingly, an aspect of the invention relates to a method for treating or preventing Parkinson's Disease by correcting one or more pathogenic G-to-A or C-to-T mutations/SNPs, particularly one or more pathogenic G-to-A or C-to-T mutations/SNPs in at least one gene selected from SNCA, PLA2G6, FBXO7, VPS35, EIF4G1, DNAJC6, PRKN, SYNJ1, CHCHD2, PINK1, PARK7, LRRK2, ATP13A2, and GBA, and more particularly one or more pathogenic G-to-A or C-to-T mutations/SNPs described above.

### Autism

[0737] In some embodiments, the methods, systems, and compositions described herein are used to correct one or more pathogenic G-to-A or C-to-T mutations/SNPs associated with Autism. In some embodiments, the pathogenic mutations/SNPs are present in at least one gene selected from MECP2, NLGN3, SLC9A9, EHMT1, CHD8, NLGN4X, GSPT2, and PTEN, including at least the followings:

### NM_001110792.1(MECP2):c.916C>T (p.Arg306Ter)

### NM_004992.3(MECP2):c.473C>T (p.Thr158Met)

### NM_018977.3(NLGN3):c.1351C>T (p.Arg451Cys)

### NM_173653.3(SLC9A9):c.1267C>T (p.Arg423Ter)

### NM_024757.4(EHMT1):c.3413G>A (p.Trp1138Ter)

### NM_020920.3(CHD8):c.2875C>T (p.Gln959Ter)

### NM_020920.3(CHD8):c.3172C>T (p.Arg1058Ter)

### NM_181332.2(NLGN4X):c.301C>T (p.Arg101Ter)

### NM_018094.4(GSPT2):c.1021G>A (p.Val341Ile)

### NM_000314.6(PTEN):c.392C>T (p.Thr13 Me)

[0738] See Table A. Accordingly, an aspect of the invention relates to a method for treating or preventing Autism by correcting one or more pathogenic G-to-A or C-to-T mutations/SNPs, particularly one or more pathogenic G-to-A or C-to-T mutations/SNPs present in at least one gene selected from MECP2, NLGN3, SLC9A9, EHMT1, CHD8, NLGN4X, GSPT2, and PTEN, and more particularly one or more pathogenic G-to-A or C-to-T mutations/SNPs described above.

### Amyotrophyic Lateral Sclerosis (ALS)

[0739] In some embodiments, the methods, systems, and compositions described herein are used to correct one or more pathogenic G-to-A or C-to-T mutations/SNPs associated with ALS. In some embodiments, the pathogenic mutations/SNPs are present in at least one gene selected from SOD1, VCP, UBQLN2, ERBB4, HNRNPA1, TUBA4A, SOD1, TARDBP, FIG4, OPTN, SETX, SPG11, FUS, VAPB, ANG, CHCHD10, SQSTM1, and TBK1, including at least the followings:

### NM_000454.4(SOD1):c.289G>A (p.Asp97Asn)

### NM_007126.3(VCP):c.1774G>A (p.Asp592Asn)

### NM_007126.3(VCP):c.464G>A (p.Arg155His)

### NM_007126.3(VCP):c.572G>A (p.Arg191Gln)

### NM_013444.3(UBQLN2):c.1489C>T (p.Pro497Ser)

### NM_013444.3(UBQLN2):c.1525C>T (p.Pro509Ser)

### NM_013444.3(UBQLN2):c.1573C>T (p.Pro525Ser)

### NM_013444.3(UBQLN2):c.1490C>T (p.Pro497Leu)

### NM_005235.2(ERBB4):c.2780G>A (p.Arg927Gln)

### NM_005235.2(ERBB4):c.3823C>T (p.Arg1275Trp)

### NM_031157.3(HNRNPA1):c.940G>A (p.Asp314Asn)

### NM_006000.2(TUBA4A):c.643C>T (p.Arg215Cys)

### NM_006000.2(TUBA4A):c.958C>T (p.Arg320Cys)

### NM_006000.2(TUBA4A):c.959G>A (p.Arg320His)

### NM_006000.2(TUBA4A):c.1220G>A (p.Trp407Ter)

### NM_006000.2(TUBA4A):c.1147G>A (p.Ala383Thr)

### NM_000454.4(SOD1):c.112G>A (p.Gly38Arg)

### NM_000454.4(SOD1):c.124G>A (p.Gly42Ser)

### NM_000454.4(SOD1):c.125G>A (p.Gly42Asp)

### NM_000454.4(SOD1):c.14C>T (p.Ala5Val)

### NM_000454.4(SOD1):c.13G>A (p.Ala5Thr)

### NM_000454.4(SOD1):c.436G>A (p.Ala146Thr)

### NM_000454.4(SOD1):c.64G>A (p.Glu22Lys)

### NM_000454.4(SOD1):c.404G>A (p.Ser135Asn)

### NM_000454.4(SOD1):c.49G>A (p.Gly17Ser)

### NM_000454.4(SOD1):c.217G>A (p.Gly73Ser)

### NM_007375.3(TARDBP):c.892G>A (p.Gly298Ser)

### NM_007375.3(TARDBP):c.943G>A (p.Ala315Thr)

### NM_007375.3(TARDBP):c.883G>A (p.Gly295Ser)

### NM_007375.3(TARDBP):c.*697G>A

### NM_007375.3(TARDBP):c.1144G>A (p.Ala382Thr)

### NM_007375.3(TARDBP):c.859G>A (p.Gly287Ser)

### NM_014845.5(FIG. 4):c.547C>T (p.Arg183Ter)

### NM_001008211.1(OPTN):c.1192C>T (p.Gln398Ter)

### NM_015046.5(SETX):c.6407G>A (p.Arg2136His)

### NM_015046.5(SETX):c.8C>T (p.Thr3Ile)

### NM_025137.3(SPG11):c.118C>T (p.Gln40Ter)

### NM_025137.3(SPG11):c.267G>A (p.Trp89Ter)

### NM_025137.3(SPG11):c.5974C>T (p.Arg1992Ter)

### NM_004960.3(FUS):c.1553G>A (p.Arg518Lys)

### NM_004960.3(FUS):c.1561C>T (p.Arg521Cys)

### NM_004960.3(FUS):c.1562G>A (p.Arg521His)

### NM_004960.3(FUS):c.1520G>A (p.Gly507Asp)

### NM_004960.3(FUS):c.1483C>T (p.Arg495Ter)

### NM_004960.3(FUS):c.616G>A (p.Gly206Ser)

### NM_004960.3(FUS):c.646C>T (p.Arg216Cys)

### NM_004738.4(VAPB):c.166C>T (p.Pro56Ser)

### NM_004738.4(VAPB):c.137C>T (p.Thr46Ile)

### NM_001145.4(ANG):c.164G>A (p.Arg55Lys)

### NM_001145.4(ANG):c.155G>A (p.Ser52Asn)

### NM_001145.4(ANG):c.407C>T (p.Pro136Leu)

### NM_001145.4(ANG):c.409G>A (p.Val137Ile)

### NM_001301339.1(CHCHD10):c.239C>T (p.Pro80Leu)

### NM_001301339.1(CHCHD10):c.176C>T (p.Ser59Leu)

### NM_001142298.1(SQSTM1):c.-47-1924C>T

### NM_003900.4(SQSTM1):c.1160C>T (p.Pro387Leu)

### NM_003900.4(SQSTM1):c.1175C>T (p.Pro392Leu)

### NM_013254.3(TBK1):c.1340+1G>A

### NM_013254.3(TBK1):c.2086G>A (p.Glu696Lys)

[0740] See Table A. Accordingly, an aspect of the invention relates to a method for treating or preventing ALS by correcting one or more pathogenic G-to-A or C-to-T mutations/SNPs, particularly one or more pathogenic G-to-A or C-to-T mutations/SNPs present in at least one gene selected from SOD1, VCP, UBQLN2, ERBB4, HNRNPA1, TUBA4A, SOD1, TARDBP, FIG. 4, OPTN, SETX, SPG11, FUS, VAPB, ANG, CHCHD10, SQSTM1, and TBK1, and more particularly one or more pathogenic G-to-A or C-to-T mutations/SNPs described above.

### Schizophrenia

[0741] In some embodiments, the methods, systems, and compositions described herein are used to correct one or more pathogenic G-to-A or C-to-T mutations/SNPs associated with Schizophrenia. In some embodiment, the pathogenic mutations/SNPs are present in at least one gene selected from PRODH, SETD1A, and SHANK3, including at least the followings:

### NM_016335.4(PRODH):c.1292G>A (p.Arg431His)

### NM_016335.4(PRODH):c.1397C>T (p.Thr466Met)

### NM_014712.2(SETD1A):c.2209C>T (p.Gln737Ter)

### NM_033517.1(SHANK3):c.3349C>T (p.Arg1117Ter)

[0742] NM_033517.1(SHANK3):c.1606C>T (p.Arg536Trp) See Table A. Accordingly, an aspect of the invention relates to a method for treating or preventing Schizophrenia by correcting one or more pathogenic G-to-A or C-to-T mutations/SNPs, particularly one or more pathogenic G-to-A or C-to-T mutations/SNPs present in at least one gene selected from PRODH, SETD1A, and SHANK3, and more particularly one or more pathogenic G-to-A or C-to-T mutations/SNPs described above.

### Adrenoleukodystrophy

[0743] In some embodiments, the methods, systems, and compositions described herein are used to correct one or more pathogenic G-to-A or C-to-T mutations/SNPs associated with Adrenoleukodystrophy. In some embodiment, the pathogenic mutations/SNPs are present in at least the ABCD1 gene, including at least the followings:

### NM_000033.3(ABCD1):c.421G>A (p.Ala141Thr)

### NM_000033.3(ABCD1):c.796G>A (p.Gly266Arg)

### NM_000033.3(ABCD1):c.1252C>T (p.Arg418Trp)

### NM_000033.3(ABCD1):c.1552C>T (p.Arg518Trp)

### NM_000033.3(ABCD1):c.1850G>A (p.Arg617His)

### NM_000033.3(ABCD1):c.1396C>T (p.Gln466Ter)

### NM_000033.3(ABCD1):c.1553G>A (p.Arg518Gln)

### NM_000033.3(ABCD1):c.1679C>T (p.Pro560Leu)

### NM_000033.3(ABCD1):c.1771C>T (p.Arg591Trp)

### NM_000033.3(ABCD1):c.1802G>A (p.Trp601Ter)

### NM_000033.3(ABCD1):c.346G>A (p.Gly116Arg)

### NM_000033.3(ABCD1):c.406C>T (p.Gln136Ter)

### NM_000033.3(ABCD1):c.1661G>A (p.Arg554His)

### NM_000033.3(ABCD1):c.1825G>A (p.Glu609Lys)

### NM_000033.3(ABCD1):c.1288C>T (p.Gln430Ter)

### NM_000033.3(ABCD1):c.1781-1G>A

### NM_000033.3(ABCD1):c.529C>T (p.Gln177Ter)

### NM_000033.3(ABCD1):c.1866-10G>A

[0744] See Table A. Accordingly, an aspect of the invention relates to a method for treating or preventing Adrenoleukodystrophy by correcting one or more pathogenic G-to-A or C-to-T mutations/SNPs, particularly one or more pathogenic G-to-A or C-to-T mutations/SNPs present in at least the ABCD1 gene, and more particularly one or more pathogenic G-to-A or C-to-T mutations/SNPs described above.

### Aicardi Goutieres Syndrome

[0745] In some embodiments, the methods, systems, and compositions described herein are used to correct one or more pathogenic G-to-A or C-to-T mutations/SNPs associated with Aicardi Goutieres syndrome. In some embodiment, the pathogenic mutations/SNPs are present in at least one gene selected from TREX1, RNASEH2C, ADAR, and IFIH1, including at least the followings:

### NM_016381.5(TREX1):c.794G>A (p.Trp265Ter)

### NM_033629.4(TREX1):c.52G>A (p.Asp18Asn)

### NM_033629.4(TREX1):c.490C>T (p.Arg164Ter)

### NM_032193.3(RNASEH2C):c.205C>T (p.Arg69Trp)

### NM_001111.4(ADAR):c.3019G>A (p.Gly1007Arg)

### NM_022168.3(IFIH1):c.2336G>A (p.Arg779His)

### NM_022168.3(IFIH1):c.2335C>T (p.Arg779Cys)

[0746] See Table A. Accordingly, an aspect of the invention relates to a method for treating or preventing Aicardi Goutieres syndrome by correcting one or more pathogenic G-to-A or C-to-T mutations/SNPs, particularly one or more pathogenic G-to-A or C-to-T mutations/SNPs present in at least one gene selected from TREX1, RNASEH2C, ADAR, and IFIH1, and more particularly one or more pathogenic G-to-A or C-to-T mutations/SNPs described above.

### Fabry Disease

[0747] In some embodiments, the methods, systems, and compositions described herein are used to correct one or more pathogenic G-to-A or C-to-T mutations/SNPs associated with Fabry disease. In some embodiment, the pathogenic mutations/SNPs are present in at least the GLA gene, including at least the followings:

### NM_000169.2(GLA):c.1024C>T (p.Arg342Ter)

### NM_000169.2(GLA):c.1066C>T (p.Arg356Trp)

### NM_000169.2(GLA):c.1025G>A (p.Arg342Gln)

### NM_000169.2(GLA):c.281G>A (p.Cys94Tyr)

### NM_000169.2(GLA):c.677G>A (p.Trp226Ter)

### NM_000169.2(GLA):c.734G>A (p.Trp245Ter)

### NM_000169.2(GLA):c.748C>T (p.Gln250Ter)

### NM_000169.2(GLA):c.658C>T (p.Arg220Ter)

### NM_000169.2(GLA):c.730G>A (p.Asp244Asn)

### NM_000169.2(GLA):c.369+1G>A

### NM_000169.2(GLA):c.335G>A (p.Arg112His)

### NM_000169.2(GLA):c.485G>A (p.Trp162Ter)

### NM_000169.2(GLA):c.661C>T (p.Gln221Ter)

### NM_000169.2(GLA):c.916C>T (p.Gln306Ter)

### NM_000169.2(GLA):c.1072G>A (p.Glu358Lys)

### NM_000169.2(GLA):c.1087C>T (p.Arg363Cys)

### NM_000169.2(GLA):c.1088G>A (p.Arg363His)

### NM_000169.2(GLA):c.605G>A (p.Cys202Tyr)

### NM_000169.2(GLA):c.830G>A (p.Trp277Ter)

### NM_000169.2(GLA):c.979C>T (p.Gln327Ter)

[0748] NM_000169.2(GLA):c.422C>T (p.Thr141Ile)

### NM_000169.2(GLA):c.285G>A (p.Trp95Ter)

### NM_000169.2(GLA):c.735G>A (p.Trp245Ter)

### NM_000169.2(GLA):c.639+919G>A

### NM_000169.2(GLA):c.680G>A (p.Arg227Gln)

### NM_000169.2(GLA):c.679C>T (p.Arg227Ter)

### NM_000169.2(GLA):c.242G>A (p.Trp81Ter)

### NM_000169.2(GLA):c.901C>T (p.Arg301Ter)

### NM_000169.2(GLA):c.974G>A (p.Gly325Asp)

### NM_000169.2(GLA):c.847C>T (p.Gln283Ter)

### NM_000169.2(GLA):c.469C>T (p.Gln157Ter)

### NM_000169.2(GLA):c.1118G>A (p.Gly373Asp)

[0749] See Table A. Accordingly, an aspect of the invention relates to a method for treating or preventing Fabry disease by correcting one or more pathogenic G-to-A or C-to-T mutations/SNPs, particularly one or more pathogenic G-to-A or C-to-T mutations/SNPs present in at least the GLA gene, and more particularly one or more pathogenic G-to-A or C-to-T mutations/SNPs described above.

### Lesch-Nyhan Syndrome

[0750] In some embodiments, the methods, systems, and compositions described herein are used to correct one or more pathogenic G-to-A or C-to-T mutations/SNPs associated with Lesch-Nyhan syndrome. In some embodiment, the pathogenic mutations/SNPs are present in at least the HPRT1 gene, including at least the followings:

### NM_000194.2(HPRT1):c.151C>T (p.Arg51Ter)

### NM_000194.2(HPRT1):c.384+1G>A

[0751] See Table A. Accordingly, an aspect of the invention relates to a method for treating or preventing Lesch-Nyhan syndrome by correcting one or more pathogenic G-to-A or C-to-T mutations/SNPs, particularly one or more pathogenic G-to-A or C-to-T mutations/SNPs present in at least the HPRT1 gene, and more particularly one or more pathogenic G-to-A or C-to-T mutations/SNPs described above.

### Menkes Disease

[0752] In some embodiments, the methods, systems, and compositions described herein are used to correct one or more pathogenic G-to-A or C-to-T mutations/SNPs associated with Menkes Disease. In some embodiment, the pathogenic mutations/SNPs are present in at least the ATP7A gene, including at least the followings:

### NM_000052.6(ATP7A):c.601C>T (p.Arg201Ter)

### NM_000052.6(ATP7A):c.2938C>T (p.Arg980Ter)

### NM_000052.6(ATP7A):c.3056G>A (p.Gly1019Asp)

### NM_000052.6(ATP7A):c.598C>T (p.Gln200Ter)

### NM_000052.6(ATP7A):c.1225C>T (p.Arg409Ter)

### NM_000052.6(ATP7A):c.1544-1G>A

### NM_000052.6(ATP7A):c.1639C>T (p.Arg547Ter)

### NM_000052.6(ATP7A):c.1933C>T (p.Arg645Ter)

### NM_000052.6(ATP7A):c.1946+5G>A

### NM_000052.6(ATP7A):c.1950G>A (p.Trp650Ter)

### NM_000052.6(ATP7A):c.2179G>A (p.Gly727Arg)

### NM_000052.6(ATP7A):c.2187G>A (p.Trp729Ter)

### NM_000052.6(ATP7A):c.2383C>T (p.Arg795Ter)

### NM_000052.6(ATP7A):c.2499-1G>A

### NM_000052.6(ATP7A):c.2555C>T (p.Pro852Leu)

### NM_000052.6(ATP7A):c.2956C>T (p.Arg986Ter)

### NM_000052.6(ATP7A):c.3112-1G>A

### NM_000052.6(ATP7A):c.3466C>T (p.Gln1156Ter)

### NM_000052.6(ATP7A):c.3502C>T (p.Gln1168Ter)

### NM_000052.6(ATP7A):c.3764G>A (p.Gly1255Glu)

### NM_000052.6(ATP7A):c.3943G>A (p.Gly1315Arg)

### NM_000052.6(ATP7A):c.4123+1G>A

### NM_000052.6(ATP7A):c.4226+5G>A

[0753] See Table A. Accordingly, an aspect of the invention relates to a method for treating or preventing Menkes Disease by correcting one or more pathogenic G-to-A or C-to-T mutations/SNPs, particularly one or more pathogenic G-to-A or C-to-T mutations/SNPs present in at least the ATP7A gene, and more particularly one or more pathogenic G-to-A or C-to-T mutations/SNPs described above.

### Eye Diseases

[0754] Pathogenic G-to-A or C-to-T mutations/SNPs associated with various eye diseases are reported in the ClinVar database and disclosed in Table A, including but not limited to Stargardt Disease, Bardet-Biedl Syndrome, Cone-rod dystrophy, Congenital Stationary Night Blindness, Usher Syndrome, Leber Congenital Amaurosis, Retinitis Pigmentosa, and Achromatopsia. Accordingly, an aspect of the invention relates to a method for correcting one or more pathogenic G-to-A or C-to-T mutations/SNPs associated with any of these diseases, as discussed below.

### Stargardt Disease

[0755] In some embodiments, the methods, systems, and compositions described herein are used to correct one or more pathogenic G-to-A or C-to-T mutations/SNPs associated with Stargardt Disease. In some embodiment, the pathogenic mutations/SNPs are present in the ABCA4 gene, including at least the followings:

### NM_000350.2(ABCA4):c.4429C>T (p.Gln1477Ter)

### NM_000350.2(ABCA4):c.6647C>T (p.Ala2216Val)

### NM_000350.2(ABCA4):c.5312+1G>A

### NM_000350.2(ABCA4):c.5189G>A (p.Trp1730Ter)

### NM_000350.2(ABCA4):c.4352+1G>A

### NM_000350.2(ABCA4):c.4253+5G>A

### NM_000350.2(ABCA4):c.3871C>T (p.Gln1291Ter)

### NM_000350.2(ABCA4):c.3813G>A (p.Glu1271=)

### NM_000350.2(ABCA4):c.1293G>A (p.Trp431Ter)

### NM_000350.2(ABCA4):c.206G>A (p.Trp69Ter)

### NM_000350.2(ABCA4):c.3322C>T (p.Arg1108Cys)

### NM_000350.2(ABCA4):c.1804C>T (p.Arg602Trp)

### NM_000350.2(ABCA4):c.1937+1G>A

### NM_000350.2(ABCA4):c.2564G>A (p.Trp855Ter)

### NM_000350.2(ABCA4):c.4234C>T (p.Gln1412Ter)

### NM_000350.2(ABCA4):c.4457C>T (p.Pro1486Leu)

### NM_000350.2(ABCA4):c.4594G>A (p.Asp1532Asn)

### NM_000350.2(ABCA4):c.4919G>A (p.Arg1640Gln)

### NM_000350.2(ABCA4):c.5196+1G>A

### NM_000350.2(ABCA4):c.6316C>T (p.Arg2106Cys)

### NM_000350.2(ABCA4):c.3056C>T (p.Thr1019Met)

### NM_000350.2(ABCA4):c.52C>T (p.Arg18Trp)

### NM_000350.2(ABCA4):c.122G>A (p.Trp41Ter)

### NM_000350.2(ABCA4):c.1903C>T (p.Gln635Ter)

### NM_000350.2(ABCA4):c.194G>A (p.Gly65Glu)

### NM_000350.2(ABCA4):c.3085C>T (p.Gln1029Ter)

### NM_000350.2(ABCA4):c.4195G>A (p.Glu1399Lys)

### NM_000350.2(ABCA4):c.454C>T (p.Arg152Ter)

### NM_000350.2(ABCA4):c.45G>A (p.Trp15Ter)

### NM_000350.2(ABCA4):c.4610C>T (p.Thr1537Met)

### NM_000350.2(ABCA4):c.6112C>T (p.Arg2038Trp)

### NM_000350.2(ABCA4):c.6118C>T (p.Arg2040Ter)

### NM_000350.2(ABCA4):c.6342G>A (p.Val2114=)

### NM_000350.2(ABCA4):c.6658C>T (p.Gln2220Ter)

[0756] See Table A. Accordingly, an aspect of the invention relates to a method for treating or preventing Stargardt Disease by correcting one or more pathogenic G-to-A or C-to-T mutations/SNPs, particularly one or more pathogenic G-to-A or C-to-T mutations/SNPs present in the ABCA4 gene, and more particularly one or more pathogenic G-to-A or C-to-T mutations/SNPs described above.

### Bardet-Biedl Syndrome

[0757] In some embodiments, the methods, systems, and compositions described herein are used to correct one or more pathogenic G-to-A or C-to-T mutations/SNPs associated with Bardet-Biedl Syndrome. In some embodiment, the pathogenic mutations/SNPs are present in at least one gene selected from BBS1, BBS2, BBS7, BBS9, BBS10, BBS12, LZTFL1, and TRIM32, including at least the followings:

### NM_024649.4(BBS1):c.416G>A (p.Trp139Ter)

### NM_024649.4(BBS1):c.871C>T (p.Gln291Ter)

### NM_198428.2(BBS9):c.263+1G>A

### NM_001178007.1(BBS12):c.1704G>A (p.Trp568Ter)

### NM_001276378.1(LZTFL1):c.271C>T (p.Arg91Ter)

### NM_031885.3(BBS2):c.1864C>T (p.Arg622Ter)

### NM_198428.2(BBS9):c.1759C>T (p.Arg587Ter)

### NM_198428.2(BBS9):c.1789+1G>A

### NM_024649.4(BBS1):c.432+1G>A

### NM_176824.2(BBS7):c.632C>T (p.Thr211Ile)

### NM_012210.3(TRIM32):c.388C>T (p.Pro130Ser)

### NM_031885.3(BBS2):c.823C>T (p.Arg275Ter)

### NM_024685.3(BBS10):c.145C>T (p.Arg49Trp)

[0758] See Table A. Accordingly, an aspect of the invention relates to a method for treating or preventing Bardet-Biedl Syndrome by correcting one or more pathogenic G-to-A or C-to-T mutations/SNPs, particularly one or more pathogenic G-to-A or C-to-T mutations/SNPs present in at least one gene selected from BBS1, BBS2, BBS7, BBS9, BBS10, BBS12, LZTFL1, and TRIM32, and more particularly one or more pathogenic G-to-A or C-to-T mutations/SNPs described above.

### Cone-Rod Dystrophy

[0759] In some embodiments, the methods, systems, and compositions described herein are used to correct one or more pathogenic G-to-A or C-to-T mutations/SNPs associated with Cone-rod dystrophy. In some embodiment, the pathogenic mutations/SNPs are present in at least one gene selected from RPGRIP1, DRAM2, ABCA4, ADAMS, and CACNA1F, including at least the followings:

### NM_020366.3(RPGRIP1):c.154C>T (p.Arg52Ter)

### NM_178454.5(DRAM2):c.494G>A (p.Trp165Ter)

### NM_178454.5(DRAM2):c.131G>A (p.Ser44Asn)

### NM_000350.2(ABCA4):c.161G>A (p.Cys54Tyr)

### NM_000350.2(ABCA4):c.5714+5G>A

### NM_000350.2(ABCA4):c.880C>T (p.Gln294Ter)

### NM_000350.2(ABCA4):c.6079C>T (p.Leu2027Phe)

### NM_000350.2(ABCA4):c.3113C>T (p.Ala1038Val)

### NM_000350.2(ABCA4):c.634C>T (p.Arg212Cys)

### NM_003816.2(ADAM9):c.490C>T (p.Arg164Ter)

### NM_005183.3(CACNA1F):c.244C>T (p.Arg82Ter)

[0760] See Table A. Accordingly, an aspect of the invention relates to a method for treating or preventing Cone-rod dystrophy by correcting one or more pathogenic G-to-A or C-to-T mutations/SNPs, particularly one or more pathogenic G-to-A or C-to-T mutations/SNPs present in at least one gene selected from RPGRIP1, DRAM2, ABCA4, ADAMS, and CACNA1F, and more particularly one or more pathogenic G-to-A or C-to-T mutations/SNPs described above.

### Congenital Stationary Night Blindness

[0761] In some embodiments, the methods, systems, and compositions described herein are used to correct one or more pathogenic G-to-A or C-to-T mutations/SNPs associated with Congenital Stationary Night Blindness. In some embodiment, the pathogenic mutations/SNPs are present in at least one gene selected from GRM6, TRPM1, GPR179, and CACNA1F, including at least the followings:

### NM_000843.3(GRM6):c.1462C>T (p.Gln488Ter)

### NM_002420.5(TRPM1):c.2998C>T (p.Arg1000Ter)

### NM_001004334.3(GPR179):c.673C>T (p.Gln225Ter)

### NM_005183.3(CACNA1F):c.2576+1G>A

[0762] See Table A. Accordingly, an aspect of the invention relates to a method for treating or preventing Congenital Stationary Night Blindness by correcting one or more pathogenic G-to-A or C-to-T mutations/SNPs, particularly one or more pathogenic G-to-A or C-to-T mutations/SNPs present in at least one gene selected from GRM6, TRPM1, GPR179, and CACNA1F, and more particularly one or more pathogenic G-to-A or C-to-T mutations/SNPs described above.

### Usher Syndrome

[0763] In some embodiments, the methods, systems, and compositions described herein are used to correct one or more pathogenic G-to-A or C-to-T mutations/SNPs associated with Usher Syndrome. In some embodiment, the pathogenic mutations/SNPs are present in at least one gene selected from MYO7A, USH1C, CDH23, PCDH15, USH2A, ADGRV1, WHRN, and CLRN1, including at least the followings:

### NM_000260.3(MYO7A):c.640G>A (p.Gly214Arg)

### NM_000260.3(MYO7A):c.1200+1G>A

### NM_000260.3(MYO7A):c.141G>A (p.Trp47Ter)

### NM_000260.3(MYO7A):c.1556G>A (p.Gly519Asp)

### NM_000260.3(MYO7A):c.1900C>T (p.Arg634Ter)

### NM_000260.3(MYO7A):c.1963C>T (p.Gln655Ter)

### NM_000260.3(MYO7A):c.2094+1G>A

### NM_000260.3(MYO7A):c.4293G>A (p.Trp1431Ter)

### NM_000260.3(MYO7A):c.5101C>T (p.Arg1701Ter)

### NM_000260.3(MYO7A):c.5617C>T (p.Arg1873Trp)

### NM_000260.3(MYO7A):c.5660C>T (p.Pro1887Leu)

### NM_000260.3(MYO7A):c.6070C>T (p.Arg2024Ter)

### NM_000260.3(MYO7A):c.470+1G>A

### NM_000260.3(MYO7A):c.5968C>T (p.Gln1990Ter)

### NM_000260.3(MYO7A):c.3719G>A (p.Arg1240Gln)

### NM_000260.3(MYO7A):c.494C>T (p.Thr165Met)

### NM_000260.3(MYO7A):c.5392C>T (p.Gln1798Ter)

### NM_000260.3(MYO7A):c.5648G>A (p.Arg1883Gln)

### NM_000260.3(MYO7A):c.448C>T (p.Arg150Ter)

### NM_000260.3(MYO7A):c.700C>T (p.Gln234Ter)

### NM_000260.3(MYO7A):c.635G>A (p.Arg212His)

### NM_000260.3(MYO7A):c.1996C>T (p.Arg666Ter)

### NM_005709.3(USH1C):c.216G>A (p.Val72=)

### NM_022124.5(CDH23):c.7362+5G>A

### NM_022124.5(CDH23):c.3481C>T (p.Arg1161Ter)

### NM_022124.5(CDH23):c.3628C>T (p.Gln1210Ter)

### NM_022124.5(CDH23):c.5272C>T (p.Gln1758Ter)

### NM_022124.5(CDH23):c.5712+1G>A

### NM_022124.5(CDH23):c.5712G>A (p.Thr1904=)

### NM_022124.5(CDH23):c.5923+1G>A

### NM_022124.5(CDH23):c.6049+1G>A

### NM_022124.5(CDH23):c.7776G>A (p.Trp2592Ter)

### NM_022124.5(CDH23):c.9556C>T (p.Arg3186Ter)

### NM_022124.5(CDH23):c.3706C>T (p.Arg1236Ter)

### NM_022124.5(CDH23):c.4309C>T (p.Arg1437Ter)

### NM_022124.5(CDH23):c.6050-9G>A

### NM_033056.3(PCDH15):c.3316C>T (p.Arg1106Ter)

### NM_033056.3(PCDH15):c.7C>T (p.Arg3Ter)

### NM_033056.3(PCDH15):c.1927C>T (p.Arg643Ter)

### NM_001142772.1(PCDH15):c.400C>T (p.Arg134Ter)

### NM_033056.3(PCDH15):c.3358C>T (p.Arg1120Ter)

### NM_206933.2(USH2A):c.11048-1G>A

### NM_206933.2(USH2A):c.1143+1G>A

### NM_206933.2(USH2A):c.11954G>A (p.Trp3985Ter)

### NM_206933.2(USH2A):c.12868C>T (p.Gln4290Ter)

### NM_206933.2(USH2A):c.14180G>A (p.Trp4727Ter)

### NM_206933.2(USH2A):c.14911C>T (p.Arg4971Ter)

### NM_206933.2(USH2A):c.5788C>T (p.Arg1930Ter)

### NM_206933.2(USH2A):c.5858-1G>A

### NM_206933.2(USH2A):c.6224G>A (p.Trp2075Ter)

### NM_206933.2(USH2A):c.820C>T (p.Arg274Ter)

### NM_206933.2(USH2A):c.8981G>A (p.Trp2994Ter)

### NM_206933.2(USH2A):c.9304C>T (p.Gln3102Ter)

### NM_206933.2(USH2A):c.13010C>T (p.Thr4337Met)

### NM_206933.2(USH2A):c.14248C>T (p.Gln4750Ter)

### NM_206933.2(USH2A):c.6398G>A (p.Trp2133Ter)

### NM_206933.2(USH2A):c.632G>A (p.Trp211Ter)

### NM_206933.2(USH2A):c.6601C>T (p.Gln2201Ter)

### NM_206933.2(USH2A):c.13316C>T (p.Thr4439Ile)

### NM_206933.2(USH2A):c.4405C>T (p.Gln1469Ter)

### NM_206933.2(USH2A):c.9570+1G>A

### NM_206933.2(USH2A):c.8740C>T (p.Arg2914Ter)

### NM_206933.2(USH2A):c.8681+1G>A

### NM_206933.2(USH2A):c.1000C>T (p.Arg334Trp)

### NM_206933.2(USH2A):c.14175G>A (p.Trp4725Ter)

### NM_206933.2(USH2A):c.9390G>A (p.Trp3130Ter)

### NM_206933.2(USH2A):c.908G>A (p.Arg303His)

### NM_206933.2(USH2A):c.5776+1G>A

### NM_206933.2(USH2A):c.11156G>A (p.Arg3719His)

### NM_032119.3(ADGRV1):c.2398C>T (p.Arg800Ter)

### NM_032119.3(ADGRV1):c.7406G>A (p.Trp2469Ter)

### NM_032119.3(ADGRV1):c.12631C>T (p.Arg4211Ter)

### NM_032119.3(ADGRV1):c.7129C>T (p.Arg2377Ter)

### NM_032119.3(ADGRV1):c.14885G>A (p.Trp4962Ter)

### NM_015404.3(WHRN):c.1267C>T (p.Arg423Ter)

### NM_174878.2(CLRN1):c.619C>T (p.Arg207Ter)

[0764] See Table A. Accordingly, an aspect of the invention relates to a method for treating or preventing Enhanced Usher Syndrome by correcting one or more pathogenic G-to-A or C-to-T mutations/SNPs, particularly one or more pathogenic G-to-A or C-to-T mutations/SNPs present in at least one gene selected from MYO7A, USH1C, CDH23, PCDH15, USH2A, ADGRV1, WHRN, and CLRN1, and more particularly one or more pathogenic G-to-A or C-to-T mutations/SNPs described above.

### Leber Congenital Amaurosis

[0765] In some embodiments, the methods, systems, and compositions described herein are used to correct one or more pathogenic G-to-A or C-to-T mutations/SNPs associated with Leber Congenital Amaurosis. In some embodiment, the pathogenic mutations/SNPs are present in at least one gene selected from TULP1, RPE65, SPATA7, AIPL1, CRB1, NMNAT1, and PEX1, including at least the followings:

### NM_003322.5(TULP1):c.1495+1G>A

### NM_000329.2(RPE65):c.11+5G>A

### NM_018418.4(SPATA7):c.322C>T (p.Arg108Ter)

### NM_014336.4(AIPL1):c.784G>A (p.Gly262Ser)

### NM_201253.2(CRB1):c.1576C>T (p.Arg526Ter)

### NM_201253.2(CRB1):c.3307G>A (p.Gly1103Arg)

### NM_201253.2(CRB1):c.2843G>A (p.Cys948Tyr)

### NM_022787.3(NMNAT1):c.769G>A (p.Glu257Lys)

### NM_000466.2(PEX1):c.2528G>A (p.Gly843Asp)

[0766] See Table A. Accordingly, an aspect of the invention relates to a method for treating or preventing Leber Congenital Amaurosis by correcting one or more pathogenic G-to-A or C-to-T mutations/SNPs, particularly one or more pathogenic G-to-A or C-to-T mutations/SNPs present in at least one gene selected from TULP1, RPE65, SPATA7, AIPL1, CRB1, NMNAT1, and PEX1, and more particularly one or more pathogenic G-to-A or C-to-T mutations/SNPs described above.

### Retinitis Pigmentosa

[0767] In some embodiments, the methods, systems, and compositions described herein are used to correct one or more pathogenic G-to-A or C-to-T mutations/SNPs associated with Retinitis Pigmentosa. In some embodiment, the pathogenic mutations/SNPs are present in at least one gene selected from CRB1, IFT140, RP1, IMPDH1, PRPF31, RPGR, ABCA4, RPE65, EYS, NRL, FAM161A, NR2E3, USH2A, RHO, PDE6B, KLHL7, PDE6A, CNGB1, BEST1, C2orf71, PRPH2, CA4, CERKL, RPE65, PDE6B, and ADGRV1, including at least the followings:

### NM_001257965.1(CRB1):c.2711G>A (p.Cys904Tyr)

### NM_014714.3(IFT140):c.3827G>A (p.Gly1276Glu)

### NM_006269.1(RP1):c.2029C>T (p.Arg677Ter)

### NM_000883.3(IMPDH1):c.931G>A (p.Asp311Asn)

### NM_015629.3(PRPF31):c.1273C>T (p.Gln425Ter)

### NM_015629.3(PRPF31):c.1073+1G>A

### NM_000328.2(RPGR):c.1387C>T (p.Gln463Ter)

### NM_000350.2(ABCA4):c.4577C>T (p.Thr1526Met)

### NM_000350.2(ABCA4):c.6229C>T (p.Arg2077Trp)

### NM_000329.2(RPE65):c.271C>T (p.Arg91Trp)

### NM_001142800.1(EYS):c.2194C>T (p.Gln732Ter)

### NM_001142800.1(EYS):c.490C>T (p.Arg164Ter)

### NM_006177.3(NRL):c.151C>T (p.Pro51Ser)

### NM_001201543.1(FAM161A):c.1567C>T (p.Arg523Ter)

### NM_014249.3(NR2E3):c.166G>A (p.Gly56Arg)

### NM_206933.2(USH2A):c.2209C>T (p.Arg737Ter)

### NM_206933.2(USH2A):c.14803C>T (p.Arg4935Ter)

### NM_206933.2(USH2A):c.10073G>A (p.Cys3358Tyr)

### NM_000539.3(RHO):c.541G>A (p.Glu181Lys)

### NM_000283.3(PDE6B):c.892C>T (p.Gln298Ter)

### NM_001031710.2(KLHL7):c.458C>T (p.Ala153Val)

### NM_000440.2(PDE6A):c.1926+1G>A

### NM_001297.4(CNGB1):c.2128C>T (p.Gln710Ter)

### NM_001297.4(CNGB1):c.952C>T (p.Gln318Ter)

### NM_004183.3(BEST1):c.682G>A (p.Asp228Asn)

### NM_001029883.2(C2orf71):c.1828C>T (p.Gln610Ter)

### NM_000322.4(PRPH2):c.647C>T (p.Pro216Leu)

### NM_000717.4(CA4):c.40C>T (p.Arg14Trp)

### NM_201548.4(CERKL):c.769C>T (p.Arg257Ter)

### NM_000329.2(RPE65):c.118G>A (p.Gly40Ser)

### NM_000322.4(PRPH2):c.499G>A (p.Gly167Ser)

### NM_000539.3(RHO):c.403C>T (p.Arg135Trp)

### NM_000283.3(PDE6B):c.2193+1G>A

### NM_032119.3(ADGRV1):c.6901C>T (p.Gln2301Ter)

[0768] See Table A. Accordingly, an aspect of the invention relates to a method for treating or preventing Retinitis Pigmentosa by correcting one or more pathogenic G-to-A or C-to-T mutations/SNPs, particularly one or more pathogenic G-to-A or C-to-T mutations/SNPs present in at least one gene selected from CRB1, IFT140, RP1, IMPDH1, PRPF31, RPGR, ABCA4, RPE65, EYS, NRL, FAM161A, NR2E3, USH2A, RHO, PDE6B, KLHL7, PDE6A, CNGB1, BEST1, C2orf71, PRPH2, CA4, CERKL, RPE65, PDE6B, and ADGRV1, and more particularly one or more pathogenic G-to-A or C-to-T mutations/SNPs described above.

### Achromatopsia

[0769] In some embodiments, the methods, systems, and compositions described herein are used to correct one or more pathogenic G-to-A or C-to-T mutations/SNPs associated with Achromatopsia. In some embodiment, the pathogenic mutations/SNPs are present in at least one gene selected from CNGA3, CNGB3, and ATF6, including at least the followings:

### NM_001298.2(CNGA3):c.847C>T (p.Arg283Trp)

### NM_001298.2(CNGA3):c.101+1G>A

### NM_001298.2(CNGA3):c.1585G>A (p.Val529Met)

### NM_019098.4(CNGB3):c.1578+1G>A

### NM_019098.4(CNGB3):c.607C>T (p.Arg203Ter)

### NM_019098.4(CNGB3):c.1119G>A (p.Trp373Ter)

### NM_007348.3(ATF6):c.970C>T (p.Arg324Cys)

[0770] See Table A. Accordingly, an aspect of the invention relates to a method for treating or preventing Achromatopsia by correcting one or more pathogenic G-to-A or C-to-T mutations/SNPs, particularly one or more pathogenic G-to-A or C-to-T mutations/SNPs present in at least one gene selected from CNGA3, CNGB3, and ATF6, and more particularly one or more pathogenic G-to-A or C-to-T mutations/SNPs described above.

### Diseases Affecting Hearing

[0771] Pathogenic G-to-A or C-to-T mutations/SNPs associated with various diseases affecting hearing are reported in the ClinVar database and disclosed in Table A, including but not limited to deafness and Nonsyndromic hearing loss. Accordingly, an aspect of the invention relates to a method for correcting one or more pathogenic G-to-A or C-to-T mutations/SNPs associated with any of these diseases, as discussed below.

### Deafness

[0772] In some embodiments, the methods, systems, and compositions described herein are used to correct one or more pathogenic G-to-A or C-to-T mutations/SNPs associated with deafness. In some embodiment, the pathogenic mutations/SNPs are present in at least one gene selected from FGF3, MYO7A, STRC, ACTG1, SLC17A8, TMC1, GJB2, MYH14, COCH, CDH23, USH1C, GJB2, MYO7A, PCDH15, MYO15A, MYO3A, WHRN, DFNB59, TMC1, LOXHD1, TMPRSS3, OTOGL, OTOF, JAG1, and MARVELD2, including at least the followings:

### NM_005247.2(FGF3):c.283C>T (p.Arg95Trp)

### NM_000260.3(MYO7A):c.652G>A (p.Asp218Asn)

### NM_000260.3(MYO7A):c.689C>T (p.Ala230Val)

### NM_153700.2(STRC):c.4057C>T (p.Gln1353Ter)

### NM_001614.3(ACTG1):c.721G>A (p.Glu241Lys)

### NM_139319.2(SLC17A8):c.632C>T (p.Ala211Val)

### NM_138691.2(TMC1):c.1714G>A (p.Asp572Asn)

### NM_004004.5(GJB2):c.598G>A (p.Gly200Arg)

### NM_004004.5(GJB2):c.71G>A (p.Trp24Ter)

### NM_004004.5(GJB2):c.416G>A (p.Ser139Asn)

### NM_004004.5(GJB2):c.224G>A (p.Arg75Gln)

### NM_004004.5(GJB2):c.95G>A (p.Arg32His)

### NM_004004.5(GJB2):c.250G>A (p.Val84Met)

### NM_004004.5(GJB2):c.428G>A (p.Arg143Gln)

### NM_004004.5(GJB2):c.551G>A (p.Arg184Gln)

### NM_004004.5(GJB2):c.223C>T (p.Arg75Trp)

### NM_024729.3(MYH14):c.359C>T (p.Ser120Leu)

### NM_004086.2(COCH):c.151C>T (p.Pro51Ser)

### NM_022124.5(CDH23):c.4021G>A (p.Asp1341Asn)

### NM_153700.2(STRC):c.4701+1G>A

### NM_153676.3(USH1C):c.496+1G>A

### NM_004004.5(GJB2):c.131G>A (p.Trp44Ter)

### NM_004004.5(GJB2):c.283G>A (p.Val95Met)

### NM_004004.5(GJB2):c.298C>T (p.His100Tyr)

### NM_004004.5(GJB2):c.427C>T (p.Arg143Trp)

### NM_004004.5(GJB2):c.109G>A (p.Val37Ile)

### NM_004004.5(GJB2):c.-23+1G>A

### NM_004004.5(GJB2):c.148G>A (p.Asp50Asn)

### NM_004004.5(GJB2):c.134G>A (p.Gly45Glu)

### NM_004004.5(GJB2):c.370C>T (p.Gln124Ter)

### NM_004004.5(GJB2):c.230G>A (p.Trp77Ter)

### NM_004004.5(GJB2):c.231G>A (p.Trp77Ter)

### NM_000260.3(MYO7A):c.5899C>T (p.Arg1967Ter)

### NM_000260.3(MYO7A):c.2005C>T (p.Arg669Ter)

### NM_033056.3(PCDH15):c.733C>T (p.Arg245Ter)

### NM_016239.3(MYO15A):c.3866+1G>A

### NM_016239.3(MYO15A):c.6178-1G>A

### NM_016239.3(MYO15A):c.8714-1G>A

### NM_017433.4(MYO3A):c.2506-1G>A

### NM_015404.3(WHRN):c.1417-1G>A

### NM_001042702.3(DFNB59):c.499C>T (p.Arg167Ter)

### NM_138691.2(TMC1):c.100C>T (p.Arg34Ter)

### NM_138691.2(TMC1):c.1165C>T (p.Arg389Ter)

### NM_144612.6(LOXHD1):c.2008C>T (p.Arg670Ter)

### NM_144612.6(LOXHD1):c.4714C>T (p.Arg1572Ter)

### NM_144612.6(LOXHD1):c.4480C>T (p.Arg1494Ter)

### NM_024022.2(TMPRSS3):c.325C>T (p.Arg109Trp)

### NM_173591.3(OTOGL):c.3076C>T (p.Gln1026Ter)

### NM_194248.2(OTOF):c.4483C>T (p.Arg1495Ter)

### NM_194248.2(OTOF):c.2122C>T (p.Arg708Ter)

### NM_194248.2(OTOF):c.2485C>T (p.Gln829Ter)

### NM_001038603.2(MARVELD2):c.1498C>T (p.Arg500Ter)

[0773] See Table A. Accordingly, an aspect of the invention relates to a method for treating or preventing deafness by correcting one or more pathogenic G-to-A or C-to-T mutations/SNPs, particularly one or more pathogenic G-to-A or C-to-T mutations/SNPs present in at least one gene selected from FGF3, MYO7A, STRC, ACTG1, SLC17A8, TMC1, GJB2, MYH14, COCH, CDH23, USH1C, GJB2, MYO7A, PCDH15, MYO15A, MYO3A, WHRN, DFNB59, TMC1, LOXHD1, TMPRSS3, OTOGL, OTOF, JAG1, and MARVELD2, and more particularly one or more pathogenic G-to-A or C-to-T mutations/SNPs described above.

### Nonsyndromic Hearing Loss

[0774] In some embodiments, the methods, systems, and compositions described herein are used to correct one or more pathogenic G-to-A or C-to-T mutations/SNPs associated with Nonsyndromic hearing loss. In some embodiment, the pathogenic mutations/SNPs are present in at least one gene selected from GJB2, POU3F4, MYO15A, TMPRSS3, LOXHD1, OTOF, MYO6, OTOA, STRC, TRIOBP, MARVELD2, TMC1, TECTA, OTOGL, and GIPC3, including at least the followings:

### NM_004004.5(GJB2):c.169C>T (p.Gln57Ter)

### NM_000307.4(POU3F4):c.499C>T (p.Arg167Ter)

### NM_016239.3(MYO15A):c.8767C>T (p.Arg2923Ter)

### NM_024022.2(TMPRSS3):c.323-6G>A

### NM_024022.2(TMPRSS3):c.916G>A (p.Ala306Thr)

### NM_144612.6(LOXHD1):c.2497C>T (p.Arg833Ter)

### NM_194248.2(OTOF):c.2153G>A (p.Trp718Ter)

### NM_194248.2(OTOF):c.2818C>T (p.Gln940Ter)

### NM_194248.2(OTOF):c.4799+1G>A

### NM_004999.3(MYO6):c.826C>T (p.Arg276Ter)

### NM_144672.3(OTOA):c.1880+1G>A

### NM_153700.2(STRC):c.5188C>T (p.Arg1730Ter)

### NM_153700.2(STRC):c.3670C>T (p.Arg1224Ter)

### NM_153700.2(STRC):c.4402C>T (p.Arg1468Ter)

### NM_024022.2(TMPRSS3):c.1192C>T (p.Gln398Ter)

### NM_001039141.2(TRIOBP):c.6598C>T (p.Arg2200Ter)

### NM_016239.3(MYO15A):c.7893+1G>A

### NM_016239.3(MYO15A):c.5531+1G>A

### NM_016239.3(MYO15A):c.6046+1G>A

### NM_144612.6(LOXHD1):c.3169C>T (p.Arg1057Ter)

### NM_001038603.2(MARVELD2):c.1331+1G>A

### NM_138691.2(TMC1):c.1676G>A (p.Trp559Ter)

### NM_138691.2(TMC1):c.1677G>A (p.Trp559Ter)

### NM_005422.2(TECTA):c.5977C>T (p.Arg1993Ter)

### NM_173591.3(OTOGL):c.4987C>T (p.Arg1663Ter)

### NM_153700.2(STRC):c.3493C>T (p.Gln1165Ter)

### NM_153700.2(STRC):c.3217C>T (p.Arg1073Ter)

### NM_016239.3(MYO15A):c.5896C>T (p.Arg1966Ter)

### NM_133261.2(GIPC3):c.411+1G>A

[0775] See Table A. Accordingly, an aspect of the invention relates to a method for treating or preventing Nonsyndromic hearing loss by correcting one or more pathogenic G-to-A or C-to-T mutations/SNPs, particularly one or more pathogenic G-to-A or C-to-T mutations/SNPs present in at least one gene selected from GJB2, POU3F4, MYO15A, TMPRSS3, LOXHD1, OTOF, MYO6, OTOA, STRC, TRIOBP, MARVELD2, TMC1, TECTA, OTOGL, and GIPC3, and more particularly one or more pathogenic G-to-A or C-to-T mutations/SNPs described above.

### Blood Disorders

[0776] Pathogenic G-to-A or C-to-T mutations/SNPs associated with various blood disorders are reported in the ClinVar database and disclosed in Table A, including but not limited to Beta-thalassemia, Hemophilia A, Hemophilia B, Hemophilia C, and Wiskott-Aldrich syndrome. Accordingly, an aspect of the invention relates to a method for correcting one or more pathogenic G-to-A or C-to-T mutations/SNPs associated with any of these diseases, as discussed below.

### Beta-Thalassemia

[0777] In some embodiments, the methods, systems, and compositions described herein are used to correct one or more pathogenic G-to-A or C-to-T mutations/SNPs associated with Beta-thalassemia. In some embodiment, the pathogenic mutations/SNPs are present in at least the HBB gene, including at least the followings:

### NM_000518.4(HBB):c.-137C>T

### NM_000518.4(HBB):c.-50-88C>T

### NM_000518.4(HBB):c.-140C>T

### NM_000518.4(HBB):c.316-197C>T

### NM_000518.4(HBB):c.93-21G>A

### NM_000518.4(HBB):c.114G>A (p.Trp38Ter)

### NM_000518.4(HBB):c.118C>T (p.Gln40Ter)

### NM_000518.4(HBB):c.92+1G>A

### NM_000518.4(HBB):c.315+1G>A

### NM_000518.4(HBB):c.92+5G>A

### NM_000518.4(HBB):c.-50-101C>T

[0778] See Table A. Accordingly, an aspect of the invention relates to a method for treating or preventing Beta-thalassemia by correcting one or more pathogenic G-to-A or C-to-T mutations/SNPs, particularly one or more pathogenic G-to-A or C-to-T mutations/SNPs present in the HBB gene, and more particularly one or more pathogenic G-to-A or C-to-T mutations/SNPs described above.

### Hemophilia A

[0779] In some embodiments, the methods, systems, and compositions described herein are used to correct one or more pathogenic G-to-A or C-to-T mutations/SNPs associated with Hemophilia A. In some embodiment, the pathogenic mutations/SNPs are present in at least the F8 gene, including at least the followings:

### NM_000132.3(F8):c.3169G>A (p.Glu1057Lys)

### NM_000132.3(F8):c.902G>A (p.Arg301His)

### NM_000132.3(F8):c.1834C>T (p.Arg612Cys)

[0780] See Table A. Accordingly, an aspect of the invention relates to a method for treating or preventing Hemophilia A by correcting one or more pathogenic G-to-A or C-to-T mutations/SNPs, particularly one or more pathogenic G-to-A or C-to-T mutations/SNPs present in the F8 gene, and more particularly one or more pathogenic G-to-A or C-to-T mutations/SNPs described above.

### Factor V Leiden

[0781] In some embodiments, the methods, systems, and compositions described herein are used to correct Factor V Leiden mutations. This disease-causing single point mutation (G1746->A) represents the most abundant genetic risk factor in heritable multifactorial thrombophilia in the Caucasian population. Due to the point mutation, a single amino acid substitution (R534[RIGHTWARDS ARROW]Q) appears at the Protein C dependent proteolytic cleavage site (R533R534) of the blood coagulation factor F5. Whereas the heterozygous defect is accompanied by an only minor increase in thrombosis risk (ca. 8-fold), the homozygous defect has a much more pronounced effect (>80-fold increased risk).19 Directed RNA editing has the potential to compensate for this genetic defect by its repair at the RNA level.

### Hemophilia B

[0782] In some embodiments, the methods, systems, and compositions described herein are used to correct one or more pathogenic G-to-A or C-to-T mutations/SNPs associated with Hemophilia B. In some embodiment, the pathogenic mutations/SNPs are present in at least the F9 gene, including at least the followings:

### NM_000133.3(F9):c.835G>A (p.Ala279Thr)

[0783] See Table A. Accordingly, an aspect of the invention relates to a method for treating or preventing Hemophilia B by correcting one or more pathogenic G-to-A or C-to-T mutations/SNPs, particularly one or more pathogenic G-to-A or C-to-T mutations/SNPs present in the F9 gene, and more particularly one or more pathogenic G-to-A or C-to-T mutations/SNPs described above.

### Hemophilia C

[0784] In some embodiments, the methods, systems, and compositions described herein are used to correct one or more pathogenic G-to-A or C-to-T mutations/SNPs associated with Hemophilia C. In some embodiment, the pathogenic mutations/SNPs are present in at least the F11 gene, including at least the followings:

### NM_000128.3(F11):c.400C>T (p.Gln134Ter)

### NM_000128.3(F11):c.1432G>A (p.Gly478Arg)

### NM_000128.3(F11):c.1288G>A (p.Ala430Thr)

### NM_000128.3(F11):c.326-1G>A

[0785] See Table A. Accordingly, an aspect of the invention relates to a method for treating or preventing Hemophilia C by correcting one or more pathogenic G-to-A or C-to-T mutations/SNPs, particularly one or more pathogenic G-to-A or C-to-T mutations/SNPs present in the F11 gene, and more particularly one or more pathogenic G-to-A or C-to-T mutations/SNPs described above.

### Wiskott-Aldrich Syndrome

[0786] In some embodiments, the methods, systems, and compositions described herein are used to correct one or more pathogenic G-to-A or C-to-T mutations/SNPs associated with Wiskott-Aldrich syndrome. In some embodiment, the pathogenic mutations/SNPs are present in at least the WAS gene, including at least the followings:

### NM_000377.2(WAS):c.37C>T (p.Arg13Ter)

### NM_000377.2(WAS):c.257G>A (p.Arg86His)

### NM_000377.2(WAS):c.777+1G>A

[0787] See Table A. Accordingly, an aspect of the invention relates to a method for treating or preventing Wiskott-Aldrich syndrome by correcting one or more pathogenic G-to-A or C-to-T mutations/SNPs, particularly one or more pathogenic G-to-A or C-to-T mutations/SNPs present in the WAS gene, and more particularly one or more pathogenic G-to-A or C-to-T mutations/SNPs described above.

### Liver Diseases

[0788] Pathogenic G-to-A or C-to-T mutations/SNPs associated with various liver diseases are reported in the ClinVar database and disclosed in Table A, including but not limited to Transthyretin amyloidosis, Alpha-1-antitrypsin deficiency, Wilson's disease, and Phenylketonuria. Accordingly, an aspect of the invention relates to a method for correcting one or more pathogenic G-to-A or C-to-T mutations/SNPs associated with any of these diseases, as discussed below.

### Transthyretin Amyloidosis

[0789] In some embodiments, the methods, systems, and compositions described herein are used to correct one or more pathogenic G-to-A or C-to-T mutations/SNPs associated with Transthyretin amyloidosis. In some embodiment, the pathogenic mutations/SNPs are present in at least the TTR gene, including at least the followings:

### NM_000371.3(TTR):c.424G>A (p.Val142Ile)

### NM_000371.3(TTR):c.148G>A (p.Val50Met)

### NM_000371.3(TTR):c.118G>A (p.Val40Ile)

[0790] See Table A. Accordingly, an aspect of the invention relates to a method for treating or preventing Transthyretin amyloidosis by correcting one or more pathogenic G-to-A or C-to-T mutations/SNPs, particularly one or more pathogenic G-to-A or C-to-T mutations/SNPs present in the TTR gene, and more particularly one or more pathogenic G-to-A or C-to-T mutations/SNPs described above.

### Alpha-1-Antitrypsin Deficiency

[0791] In some embodiments, the methods, systems, and compositions described herein are used to correct one or more pathogenic G-to-A or C-to-T mutations/SNPs associated with Alpha-1-antitrypsin deficiency. In some embodiment, the pathogenic mutations/SNPs are present in at least the SERPINA1 gene, including at least the followings:

### NM_000295.4(SERPINA1):c.538C>T (p.Gln180Ter)

### NM_001127701.1(SERPINA1):c.1178C>T (p.Pro393Leu)

### NM_001127701.1(SERPINA1):c.230C>T (p.Ser77Phe)

### NM_001127701.1(SERPINA1):c.1096G>A (p.Glu366Lys)

### NM_000295.4(SERPINA1):c.1177C>T (p.Pro393Ser)

[0792] See Table A. Accordingly, an aspect of the invention relates to a method for treating or preventing Alpha-1-antitrypsin deficiency by correcting one or more pathogenic G-to-A or C-to-T mutations/SNPs, particularly one or more pathogenic G-to-A or C-to-T mutations/SNPs present in the SERPINA1 gene, and more particularly one or more pathogenic G-to-A or C-to-T mutations/SNPs described above.

### Wilson's Disease

[0793] In some embodiments, the methods, systems, and compositions described herein are used to correct one or more pathogenic G-to-A or C-to-T mutations/SNPs associated with Wilson's disease. In some embodiment, the pathogenic mutations/SNPs are present in at least the ATP7B gene, including at least the followings:

### NM_000053.3(ATP7B):c.2293G>A (p.Asp765Asn)

### NM_000053.3(ATP7B):c.3955C>T (p.Arg1319Ter)

### NM_000053.3(ATP7B):c.2865+1G>A

### NM_000053.3(ATP7B):c.3796G>A (p.Gly1266Arg)

### NM_000053.3(ATP7B):c.2621C>T (p.Ala874Val)

### NM_000053.3(ATP7B):c.2071G>A (p.Gly691Arg)

### NM_000053.3(ATP7B):c.2128G>A (p.Gly710Ser)

### NM_000053.3(ATP7B):c.2336G>A (p.Trp779Ter)

### NM_000053.3(ATP7B):c.4021G>A (p.Gly1341Ser)

### NM_000053.3(ATP7B):c.3182G>A (p.Gly1061Glu)

### NM_000053.3(ATP7B):c.4114C>T (p.Gln1372Ter)

### NM_000053.3(ATP7B):c.1708-1G>A

### NM_000053.3(ATP7B):c.865C>T (p.Gln289Ter)

### NM_000053.3(ATP7B):c.2930C>T (p.Thr977Met)

### NM_000053.3(ATP7B):c.3659C>T (p.Thr1220Met)

### NM_000053.3(ATP7B):c.2605G>A (p.Gly869Arg)

### NM_000053.3(ATP7B):c.2975C>T (p.Pro992Leu)

### NM_000053.3(ATP7B):c.2519C>T (p.Pro840Leu)

### NM_000053.3(ATP7B):c.2906G>A (p.Arg969Gln)

[0794] See Table A. Accordingly, an aspect of the invention relates to a method for treating or preventing Wilson's disease by correcting one or more pathogenic G-to-A or C-to-T mutations/SNPs, particularly one or more pathogenic G-to-A or C-to-T mutations/SNPs present in the ATP7B gene, and more particularly one or more pathogenic G-to-A or C-to-T mutations/SNPs described above.

### Phenylketonuria

[0795] In some embodiments, the methods, systems, and compositions described herein are used to correct one or more pathogenic G-to-A or C-to-T mutations/SNPs associated with Phenylketonuria. In some embodiment, the pathogenic mutations/SNPs are present in at least the PAH gene, including at least the followings:

### NM_000277.1(PAH):c.1315+1G>A

### NM_000277.1(PAH):c.1222C>T (p.Arg408Trp)

### NM_000277.1(PAH):c.838G>A (p.Glu280Lys)

### NM_000277.1(PAH):c.331C>T (p.Arg111Ter)

### NM_000277.1(PAH):c.782G>A (p.Arg261Gln)

### NM_000277.1(PAH):c.754C>T (p.Arg252Trp)

### NM_000277.1(PAH):c.473G>A (p.Arg158Gln)

### NM_000277.1(PAH):c.727C>T (p.Arg243Ter)

### NM_000277.1(PAH):c.842C>T (p.Pro281Leu)

### NM_000277.1(PAH):c.728G>A (p.Arg243Gln)

### NM_000277.1(PAH):c.1066-11G>A

### NM_000277.1(PAH):c.781C>T (p.Arg261Ter)

### NM_000277.1(PAH):c.1223G>A (p.Arg408Gln)

### NM_000277.1(PAH):c.1162G>A (p.Val388Met)

### NM_000277.1(PAH):c.1066-3C>T

### NM_000277.1(PAH):c.1208C>T (p.Ala403Val)

### NM_000277.1(PAH):c.890G>A (p.Arg297His)

### NM_000277.1(PAH):c.926C>T (p.Ala309Val)

### NM_000277.1(PAH):c.441+1G>A

### NM_000277.1(PAH):c.526C>T (p.Arg176Ter)

### NM_000277.1(PAH):c.688G>A (p.Val230Ile)

### NM_000277.1(PAH):c.721C>T (p.Arg241Cys)

### NM_000277.1(PAH):c.745C>T (p.Leu249Phe)

### NM_000277.1(PAH):c.442-1G>A

### NM_000277.1(PAH):c.842+1G>A

### NM_000277.1(PAH):c.776C>T (p.Ala259Val)

### NM_000277.1(PAH):c.1200-1G>A

### NM_000277.1(PAH):c.912+1G>A

### NM_000277.1(PAH):c.1065+1G>A

### NM_000277.1(PAH):c.472C>T (p.Arg158Trp)

### NM_000277.1(PAH):c.755G>A (p.Arg252Gln)

### NM_000277.1(PAH):c.809G>A (p.Arg270Lys)

[0796] See Table A. Accordingly, an aspect of the invention relates to a method for treating or preventing Phenylketonuria by correcting one or more pathogenic G-to-A or C-to-T mutations/SNPs, particularly one or more pathogenic G-to-A or C-to-T mutations/SNPs present in the PAH gene, and more particularly one or more pathogenic G-to-A or C-to-T mutations/SNPs described above.

### Kidney Diseases

[0797] Pathogenic G-to-A or C-to-T mutations/SNPs associated with various kidney diseases are reported in the ClinVar database and disclosed in Table A, including but not limited to Autosomal recessive polycystic kidney disease and Renal carnitine transport defect. Accordingly, an aspect of the invention relates to a method for correcting one or more pathogenic G-to-A or C-to-T mutations/SNPs associated with any of these diseases, as discussed below.

### Autosomal Recessive Polycystic Kidney Disease

[0798] In some embodiments, the methods, systems, and compositions described herein are used to correct one or more pathogenic G-to-A or C-to-T mutations/SNPs associated with Autosomal recessive polycystic kidney disease. In some embodiment, the pathogenic mutations/SNPs are present in at least the PKHD1 gene, including at least the followings:

### NM_138694.3(PKHD1):c.10444C>T (p.Arg3482Cys)

### NM_138694.3(PKHD1):c.9319C>T (p.Arg3107Ter)

### NM_138694.3(PKHD1):c.1480C>T (p.Arg494Ter)

### NM_138694.3(PKHD1):c.707+1G>A

### NM_138694.3(PKHD1):c.1486C>T (p.Arg496Ter)

### NM_138694.3(PKHD1):c.8303-1G>A

### NM_138694.3(PKHD1):c.2854G>A (p.Gly952Arg)

### NM_138694.3(PKHD1):c.7194G>A (p.Trp2398Ter)

### NM_138694.3(PKHD1):c.10219C>T (p.Gln3407Ter)

### NM_138694.3(PKHD1):c.107C>T (p.Thr36Met)

### NM_138694.3(PKHD1):c.8824C>T (p.Arg2942Ter)

### NM_138694.3(PKHD1):c.982C>T (p.Arg328Ter)

### NM_138694.3(PKHD1):c.4870C>T (p.Arg1624Trp)

### NM_138694.3(PKHD1):c.1602+1G>A

### NM_138694.3(PKHD1):c.1694-1G>A

### NM_138694.3(PKHD1):c.2341C>T (p.Arg781Ter)

### NM_138694.3(PKHD1):c.2407+1G>A

### NM_138694.3(PKHD1):c.2452C>T (p.Gln818Ter)

### NM_138694.3(PKHD1):c.5236+1G>A

### NM_138694.3(PKHD1):c.6499C>T (p.Gln2167Ter)

### NM_138694.3(PKHD1):c.2725C>T (p.Arg909Ter)

### NM_138694.3(PKHD1):c.370C>T (p.Arg124Ter)

### NM_138694.3(PKHD1):c.2810G>A (p.Trp937Ter)

[0799] See Table A. Accordingly, an aspect of the invention relates to a method for treating or preventing Autosomal recessive polycystic kidney disease by correcting one or more pathogenic G-to-A or C-to-T mutations/SNPs, particularly one or more pathogenic G-to-A or C-to-T mutations/SNPs present in the PKHD1 gene, and more particularly one or more pathogenic G-to-A or C-to-T mutations/SNPs described above.

### Renal Carnitine Transport Defect

[0800] In some embodiments, the methods, systems, and compositions described herein are used to correct one or more pathogenic G-to-A or C-to-T mutations/SNPs associated with Renal carnitine transport defect. In some embodiment, the pathogenic mutations/SNPs are present in at least the SLC22A5 gene, including at least the followings:

### NM_003060.3(SLC22A5):c.760C>T (p.Arg254Ter)

### NM_003060.3(SLC22A5):c.396G>A (p.Trp132Ter)

### NM_003060.3(SLC22A5):c.844C>T (p.Arg282Ter)

### NM_003060.3(SLC22A5):c.505C>T (p.Arg169Trp)

### NM_003060.3(SLC22A5):c.1319C>T (p.Thr440Met)

### NM_003060.3(SLC22A5):c.1195C>T (p.Arg399Trp)

### NM_003060.3(SLC22A5):c.695C>T (p.Thr232Met)

### NM_003060.3(SLC22A5):c.845G>A (p.Arg282Gln)

### NM_003060.3(SLC22A5):c.1193C>T (p.Pro398Leu)

### NM_003060.3(SLC22A5):c.1463G>A (p.Arg488His)

### NM_003060.3(SLC22A5):c.338G>A (p.Cys113Tyr)

### NM_003060.3(SLC22A5):c.136C>T (p.Pro46Ser)

### NM_003060.3(SLC22A5):c.506G>A (p.Arg169Gln)

[0801] See Table A. Accordingly, an aspect of the invention relates to a method for treating or preventing Renal carnitine transport defect by correcting one or more pathogenic G-to-A or C-to-T mutations/SNPs, particularly one or more pathogenic G-to-A or C-to-T mutations/SNPs present in the SLC22A5 gene, and more particularly one or more pathogenic G-to-A or C-to-T mutations/SNPs described above.

### Muscle Diseases

[0802] Pathogenic G-to-A or C-to-T mutations/SNPs associated with various muscle diseases are reported in the ClinVar database and disclosed in Table A, including but not limited to Duchenne muscular dystrophy, Becker muscular dystrophy, Limb-girdle muscular dystrophy, Emery-Dreifuss muscular dystrophy, and Facioscapulohumeral muscular dystrophy. Accordingly, an aspect of the invention relates to a method for correcting one or more pathogenic G-to-A or C-to-T mutations/SNPs associated with any of these diseases, as discussed below.

### Duchenne Muscular Dystrophy

[0803] In some embodiments, the methods, systems, and compositions described herein are used to correct one or more pathogenic G-to-A or C-to-T mutations/SNPs associated with Duchenne muscular dystrophy. In some embodiment, the pathogenic mutations/SNPs are present in at least the DMD gene, including at least the followings:

### NM_004006.2(DMD):c.2797C>T (p.Gln933Ter)

### NM_004006.2(DMD):c.4870C>T (p.Gln1624Ter)

### NM_004006.2(DMD):c.5551C>T (p.Gln1851Ter)

### NM_004006.2(DMD):c.3188G>A (p.Trp1063Ter)

### NM_004006.2(DMD):c.8357G>A (p.Trp2786Ter)

### NM_004006.2(DMD):c.7817G>A (p.Trp2606Ter)

### NM_004006.2(DMD):c.7755G>A (p.Trp2585Ter)

### NM_004006.2(DMD):c.5917C>T (p.Gln1973Ter)

### NM_004006.2(DMD):c.5641C>T (p.Gln1881Ter)

### NM_004006.2(DMD):c.5131C>T (p.Gln1711Ter)

### NM_004006.2(DMD):c.4240C>T (p.Gln1414Ter)

### NM_004006.2(DMD):c.3427C>T (p.Gln1143Ter)

### NM_004006.2(DMD):c.2407C>T (p.Gln803Ter)

### NM_004006.2(DMD):c.2368C>T (p.Gln790Ter)

### NM_004006.2(DMD):c.1683G>A (p.Trp561Ter)

### NM_004006.2(DMD):c.1663C>T (p.Gln555Ter)

### NM_004006.2(DMD):c.1388G>A (p.Trp463Ter)

### NM_004006.2(DMD):c.1331+1G>A

### NM_004006.2(DMD):c.1324C>T (p.Gln442Ter)

### NM_004006.2(DMD):c.355C>T (p.Gln119Ter)

### NM_004006.2(DMD):c.94-1G>A

### NM_004006.2(DMD):c.5506C>T (p.Gln1836Ter)

### NM_004006.2(DMD):c.1504C>T (p.Gln502Ter)

### NM_004006.2(DMD):c.5032C>T (p.Gln1678Ter)

### NM_004006.2(DMD):c.457C>T (p.Gln153Ter)

### NM_004006.2(DMD):c.1594C>T (p.Gln532Ter)

### NM_004006.2(DMD):c.1150-1G>A

### NM_004006.2(DMD):c.6223C>T (p.Gln2075Ter)

### NM_004006.2(DMD):c.3747G>A (p.Trp1249Ter)

### NM_004006.2(DMD):c.2861G>A (p.Trp954Ter)

### NM_004006.2(DMD):c.9563+1G>A

### NM_004006.2(DMD):c.4483C>T (p.Gln1495Ter)

### NM_004006.2(DMD):c.4312C>T (p.Gln1438Ter)

### NM_004006.2(DMD):c.8209C>T (p.Gln2737Ter)

### NM_004006.2(DMD):c.4071+1G>A

### NM_004006.2(DMD):c.2665C>T (p.Arg889Ter)

### NM_004006.2(DMD):c.2202G>A (p.Trp734Ter)

### NM_004006.2(DMD):c.2077C>T (p.Gln693Ter)

### NM_004006.2(DMD):c.1653G>A (p.Trp551Ter)

### NM_004006.2(DMD):c.1061G>A (p.Trp354Ter)

### NM_004006.2(DMD):c.8914C>T (p.Gln2972Ter)

### NM_004006.2(DMD):c.6118-1G>A

### NM_004006.2(DMD):c.4729C>T (p.Arg1577Ter)

[0804] See Table A. Accordingly, an aspect of the invention relates to a method for treating or preventing Duchenne muscular dystrophy by correcting one or more pathogenic G-to-A or C-to-T mutations/SNPs, particularly one or more pathogenic G-to-A or C-to-T mutations/SNPs present in the DMD gene, and more particularly one or more pathogenic G-to-A or C-to-T mutations/SNPs described above.

### Becker Muscular Dystrophy

[0805] In some embodiments, the methods, systems, and compositions described herein are used to correct one or more pathogenic G-to-A or C-to-T mutations/SNPs associated with Becker muscular dystrophy. In some embodiment, the pathogenic mutations/SNPs are present in at least the DMD gene, including at least the followings:

### NM_004006.2(DMD):c.3413G>A (p.Trp1138Ter)

### NM_004006.2(DMD):c.358-1G>A

### NM_004006.2(DMD):c.10108C>T (p.Arg3370Ter)

### NM_004006.2(DMD):c.6373C>T (p.Gln2125Ter)

### NM_004006.2(DMD):c.9568C>T (p.Arg3190Ter)

### NM_004006.2(DMD):c.8713C>T (p.Arg2905Ter)

### NM_004006.2(DMD):c.1615C>T (p.Arg539Ter)

### NM_004006.2(DMD):c.3151C>T (p.Arg1051Ter)

### NM_004006.2(DMD):c.3432+1G>A

### NM_004006.2(DMD):c.5287C>T (p.Arg1763Ter)

### NM_004006.2(DMD):c.5530C>T (p.Arg1844Ter)

### NM_004006.2(DMD):c.8608C>T (p.Arg2870Ter)

### NM_004006.2(DMD):c.8656C>T (p.Gln2886Ter)

### NM_004006.2(DMD):c.8944C>T (p.Arg2982Ter)

### NM_004006.2(DMD):c.5899C>T (p.Arg1967Ter)

### NM_004006.2(DMD):c.10033C>T (p.Arg3345Ter)

### NM_004006.2(DMD):c.10086+1G>A

### NM_004019.2(DMD):c.1020G>A (p.Thr340=)

### NM_004006.2(DMD):c.1261C>T (p.Gln421Ter)

### NM_004006.2(DMD):c.1465C>T (p.Gln489Ter)

### NM_004006.2(DMD):c.1990C>T (p.Gln664Ter)

### NM_004006.2(DMD):c.2032C>T (p.Gln678Ter)

### NM_004006.2(DMD):c.2332C>T (p.Gln778Ter)

### NM_004006.2(DMD):c.2419C>T (p.Gln807Ter)

### NM_004006.2(DMD):c.2650C>T (p.Gln884Ter)

### NM_004006.2(DMD):c.2804-1G>A

### NM_004006.2(DMD):c.3276+1G>A

### NM_004006.2(DMD):c.3295C>T (p.Gln1099Ter)

### NM_004006.2(DMD):c.336G>A (p.Trp112Ter)

### NM_004006.2(DMD):c.3580C>T (p.Gln1194Ter)

### NM_004006.2(DMD):c.4117C>T (p.Gln1373Ter)

### NM_004006.2(DMD):c.649+1G>A

### NM_004006.2(DMD):c.6906G>A (p.Trp2302Ter)

### NM_004006.2(DMD):c.7189C>T (p.Gln2397Ter)

### NM_004006.2(DMD):c.7309+1G>A

### NM_004006.2(DMD):c.7657C>T (p.Arg2553Ter)

### NM_004006.2(DMD):c.7682G>A (p.Trp2561Ter)

### NM_004006.2(DMD):c.7683G>A (p.Trp2561Ter)

### NM_004006.2(DMD):c.7894C>T (p.Gln2632Ter)

### NM_004006.2(DMD):c.9361+1G>A

### NM_004006.2(DMD):c.9564-1G>A

### NM_004006.2(DMD):c.2956C>T (p.Gln986Ter)

### NM_004006.2(DMD):c.883C>T (p.Arg295Ter)

### NM_004006.2(DMD):c.31+36947G>A

### NM_004006.2(DMD):c.10279C>T (p.Gln3427Ter)

### NM_004006.2(DMD):c.433C>T (p.Arg145Ter)

### NM_004006.2(DMD):c.9G>A (p.Trp3Ter)

### NM_004006.2(DMD):c.10171C>T (p.Arg3391Ter)

### NM_004006.2(DMD):c.583C>T (p.Arg195Ter)

### NM_004006.2(DMD):c.9337C>T (p.Arg3113Ter)

### NM_004006.2(DMD):c.8038C>T (p.Arg2680Ter)

### NM_004006.2(DMD):c.1812+1G>A

### NM_004006.2(DMD):c.1093C>T (p.Gln365Ter)

### NM_004006.2(DMD):c.1704+1G>A

### NM_004006.2(DMD):c.1912C>T (p.Gln638Ter)

### NM_004006.2(DMD):c.133C>T (p.Gln45Ter)

### NM_004006.2(DMD):c.5868G>A (p.Trp1956Ter)

### NM_004006.2(DMD):c.565C>T (p.Gln189Ter)

### NM_004006.2(DMD):c.5089C>T (p.Gln1697Ter)

### NM_004006.2(DMD):c.2512C>T (p.Gln838Ter)

### NM_004006.2(DMD):c.10477C>T (p.Gln3493Ter)

### NM_004006.2(DMD):c.93+1G>A

### NM_004006.2(DMD):c.4174C>T (p.Gln1392Ter)

### NM_004006.2(DMD):c.3940C>T (p.Arg1314Ter)

[0806] See Table A. Accordingly, an aspect of the invention relates to a method for treating or preventing Becker muscular dystrophy by correcting one or more pathogenic G-to-A or C-to-T mutations/SNPs, particularly one or more pathogenic G-to-A or C-to-T mutations/SNPs present in the DMD gene, and more particularly one or more pathogenic G-to-A or C-to-T mutations/SNPs described above.

### Limb-Girdle Muscular Dystrophy

[0807] In some embodiments, the methods, systems, and compositions described herein are used to correct one or more pathogenic G-to-A or C-to-T mutations/SNPs associated with Limb-girdle muscular dystrophy. In some embodiment, the pathogenic mutations/SNPs are present in at least one gene selected from SGCB, MYOT, LMNA, CAPN3, DYSF, SGCA, TTN, ANO5, TRAPPC11, LMNA, POMT1, and FKRP, including at least the followings:

### NM_000232.4(SGCB):c.31C>T (p.Gln11Ter)

### NM_006790.2(MYOT):c.164C>T (p.Ser55Phe)

### NM_006790.2(MYOT):c.170C>T (p.Thr57Ile)

### NM_170707.3(LMNA):c.1488+1G>A

### NM_170707.3(LMNA):c.1609-1G>A

### NM_000070.2(CAPN3):c.1715G>A (p.Arg572Gln)

### NM_000070.2(CAPN3):c.2243G>A (p.Arg748Gln)

### NM_000070.2(CAPN3):c.145C>T (p.Arg49Cys)

### NM_000070.2(CAPN3):c.1319G>A (p.Arg440Gln)

### NM_000070.2(CAPN3):c.1343G>A (p.Arg448His)

### NM_000070.2(CAPN3):c.1465C>T (p.Arg489Trp)

### NM_000070.2(CAPN3):c.1714C>T (p.Arg572Trp)

### NM_000070.2(CAPN3):c.2306G>A (p.Arg769Gln)

### NM_000070.2(CAPN3):c.133G>A (p.Ala45Thr)

### NM_000070.2(CAPN3):c.499-1G>A

### NM_000070.2(CAPN3):c.439C>T (p.Arg147Ter)

### NM_000070.2(CAPN3):c.1063C>T (p.Arg355Trp)

### NM_000070.2(CAPN3):c.1250C>T (p.Thr417Met)

### NM_000070.2(CAPN3):c.245C>T (p.Pro82Leu)

### NM_000070.2(CAPN3):c.2242C>T (p.Arg748Ter)

### NM_000070.2(CAPN3):c.1318C>T (p.Arg440Trp)

### NM_000070.2(CAPN3):c.1333G>A (p.Gly445Arg)

### NM_000070.2(CAPN3):c.1957C>T (p.Gln653Ter)

### NM_000070.2(CAPN3):c.1801-1G>A

### NM_000070.2(CAPN3):c.2263+1G>A

### NM_000070.2(CAPN3):c.956C>T (p.Pro319Leu)

### NM_000070.2(CAPN3):c.1468C>T (p.Arg490Trp)

### NM_000070.2(CAPN3):c.802-9G>A

### NM_000070.2(CAPN3):c.1342C>T (p.Arg448Cys)

### NM_000070.2(CAPN3):c.1303G>A (p.Glu435Lys)

### NM_000070.2(CAPN3):c.1993-1G>A

### NM_003494.3(DYSF):c.3113G>A (p.Arg1038Gln)

### NM_001130987.1(DYSF):c.5174+1G>A

### NM_001130987.1(DYSF):c.159G>A (p.Trp53Ter)

### NM_001130987.1(DYSF):c.2929C>T (p.Arg977Trp)

### NM_001130987.1(DYSF):c.4282C>T (p.Gln1428Ter)

### NM_001130987.1(DYSF):c.1577-1G>A

### NM_003494.3(DYSF):c.5529G>A (p.Trp1843Ter)

### NM_001130987.1(DYSF):c.1576+1G>A

### NM_001130987.1(DYSF):c.4462C>T (p.Gln1488Ter)

### NM_003494.3(DYSF):c.5429G>A (p.Arg1810Lys)

### NM_003494.3(DYSF):c.5077C>T (p.Arg1693Trp)

### NM_001130978.1(DYSF):c.1813C>T (p.Gln605Ter)

### NM_003494.3(DYSF):c.3230G>A (p.Trp1077Ter)

### NM_003494.3(DYSF):c.265C>T (p.Arg89Ter)

### NM_003494.3(DYSF):c.4434G>A (p.Trp1478Ter)

### NM_003494.3(DYSF):c.3478C>T (p.Gln1160Ter)

### NM_001130987.1(DYSF):c.1372G>A (p.Gly458Arg)

### NM_003494.3(DYSF):c.4090C>T (p.Gln1364Ter)

### NM_001130987.1(DYSF):c.2409+1G>A

### NM_003494.3(DYSF):c.1708C>T (p.Gln570Ter)

### NM_003494.3(DYSF):c.1956G>A (p.Trp652Ter)

### NM_001130987.1(DYSF):c.5004-1G>A

### NM_003494.3(DYSF):c.331C>T (p.Gln111Ter)

### NM_001130978.1(DYSF):c.5776C>T (p.Arg1926Ter)

### NM_003494.3(DYSF):c.6124C>T (p.Arg2042Cys)

### NM_003494.3(DYSF):c.2643+1G>A

### NM_003494.3(DYSF):c.4253G>A (p.Gly1418Asp)

### NM_003494.3(DYSF):c.610C>T (p.Arg204Ter)

### NM_003494.3(DYSF):c.1834C>T (p.Gln612Ter)

### NM_003494.3(DYSF):c.5668-7G>A

### NM_001130978.1(DYSF):c.3137G>A (p.Arg1046His)

### NM_003494.3(DYSF):c.1053+1G>A

### NM_003494.3(DYSF):c.1398-1G>A

### NM_003494.3(DYSF):c.1481-1G>A

### NM_003494.3(DYSF):c.2311C>T (p.Gln771Ter)

### NM_003494.3(DYSF):c.2869C>T (p.Gln957Ter)

### NM_003494.3(DYSF):c.4756C>T (p.Arg1586Ter)

### NM_003494.3(DYSF):c.5509G>A (p.Asp1837Asn)

### NM_003494.3(DYSF):c.5644C>T (p.Gln1882Ter)

### NM_003494.3(DYSF):c.5946+1G>A

### NM_003494.3(DYSF):c.937+1G>A

### NM_003494.3(DYSF):c.5266C>T (p.Gln1756Ter)

### NM_003494.3(DYSF):c.3832C>T (p.Gln1278Ter)

### NM_003494.3(DYSF):c.5525+1G>A

### NM_003494.3(DYSF):c.3112C>T (p.Arg1038Ter)

### NM_000023.3(SGCA):c.293G>A (p.Arg98His)

### NM_000023.3(SGCA):c.850C>T (p.Arg284Cys)

### NM_000023.3(SGCA):c.403C>T (p.Gln135Ter)

### NM_000023.3(SGCA):c.409G>A (p.Glu137Lys)

### NM_000023.3(SGCA):c.747+1G>A

### NM_000023.3(SGCA):c.229C>T (p.Arg77Cys)

### NM_000023.3(SGCA):c.101G>A (p.Arg34His)

### NM_000023.3(SGCA):c.739G>A (p.Val247Met)

### NM_001256850.1(TTN):c.87394C>T (p.Arg29132Ter)

### NM_213599.2(ANO5):c.762+1G>A

### NM_213599.2(ANO5):c.1213C>T (p.Gln405Ter)

### NM_213599.2(ANO5):c.1639C>T (p.Arg547Ter)

### NM_213599.2(ANO5):c.1406G>A (p.Trp469Ter)

### NM_213599.2(ANO5):c.1210C>T (p.Arg404Ter)

### NM_213599.2(ANO5):c.2272C>T (p.Arg758Cys)

### NM_213599.2(ANO5):c.41-1G>A

### NM_213599.2(ANO5):c.172C>T (p.Arg58Trp)

### NM_213599.2(ANO5):c.1898+1G>A

### NM_021942.5(TRAPPC11):c.1287+5G>A

### NM_170707.3(LMNA):c.1608+1G>A

### NM_007171.3(POMT1):c.1864C>T (p.Arg622Ter)

### NM_024301.4(FKRP):c.313C>T (p.Gln105Ter)

[0808] See Table A. Accordingly, an aspect of the invention relates to a method for treating or preventing Limb-girdle muscular dystrophy by correcting one or more pathogenic G-to-A or C-to-T mutations/SNPs, particularly one or more pathogenic G-to-A or C-to-T mutations/SNPs present in at least one gene selected from SGCB, MYOT, LMNA, CAPN3, DYSF, SGCA, TTN, ANO5, TRAPPC11, LMNA, POMT1, and FKRP, and more particularly one or more pathogenic G-to-A or C-to-T mutations/SNPs described above.

### Emery-Dreifuss Muscular Dystrophy

[0809] In some embodiments, the methods, systems, and compositions described herein are used to correct one or more pathogenic G-to-A or C-to-T mutations/SNPs associated with Emery-Dreifuss muscular dystrophy. In some embodiment, the pathogenic mutations/SNPs are present in at least the EMD or SYNE1 gene, including at least the followings:

### NM_000117.2(EMD):c.3G>A (p.MetlIle)

### NM_033071.3(SYNE1):c.11908C>T (p.Arg3970Ter)

### NM_033071.3(SYNE1):c.21721C>T (p.Gln7241Ter)

### NM_000117.2(EMD):c.130C>T (p.Gln44Ter)

[0810] See Table A. Accordingly, an aspect of the invention relates to a method for treating or preventing Emery-Dreifuss muscular dystrophy by correcting one or more pathogenic G-to-A or C-to-T mutations/SNPs, particularly one or more pathogenic G-to-A or C-to-T mutations/SNPs present in the EMD or SYNE1 gene, and more particularly one or more pathogenic G-to-A or C-to-T mutations/SNPs described above.

[0811] Facioscapulohumeral Muscular Dystrophy

[0812] In some embodiments, the methods, systems, and compositions described herein are used to correct one or more pathogenic G-to-A or C-to-T mutations/SNPs associated with Facioscapulohumeral muscular dystrophy. In some embodiment, the pathogenic mutations/SNPs are present in at least the SMCHD1 gene, including at least the followings:

### NM_015295.2(SMCHD1):c.3801+1G>A

### NM_015295.2(SMCHD1):c.1843-1G>A

[0813] See Table A. Accordingly, an aspect of the invention relates to a method for treating or preventing Facioscapulohumeral muscular dystrophy by correcting one or more pathogenic G-to-A or C-to-T mutations/SNPs, particularly one or more pathogenic G-to-A or C-to-T mutations/SNPs present in the SMCHD1 gene, and more particularly one or more pathogenic G-to-A or C-to-T mutations/SNPs described above.

### Inborn Errors of Metabolism (IEM)

[0814] Pathogenic G-to-A or C-to-T mutations/SNPs associated with various IEMs are reported in the ClinVar database and disclosed in Table A, including but not limited to Primary hyperoxaluria type 1, Argininosuccinate lyase deficiency, Ornithine carbamoyltransferase deficiency, and Maple syrup urine disease. Accordingly, an aspect of the invention relates to a method for correcting one or more pathogenic G-to-A or C-to-T mutations/SNPs associated with any of these diseases, as discussed below.

### Primary Hyperoxaluria Type 1

[0815] In some embodiments, the methods, systems, and compositions described herein are used to correct one or more pathogenic G-to-A or C-to-T mutations/SNPs associated with Primary hyperoxaluria type 1. In some embodiment, the pathogenic mutations/SNPs are present in at least the AGXT gene, including at least the followings:

### NM_000030.2(AGXT):c.245G>A (p.Gly82Glu)

### NM_000030.2(AGXT):c.698G>A (p.Arg233His)

### NM_000030.2(AGXT):c.466G>A (p.Gly156Arg)

### NM_000030.2(AGXT):c.106C>T (p.Arg36Cys)

### NM_000030.2(AGXT):c.346G>A (p.Gly116Arg)

### NM_000030.2(AGXT):c.568G>A (p.Gly190Arg)

### NM_000030.2(AGXT):c.653C>T (p.Ser218Leu)

### NM_000030.2(AGXT):c.737G>A (p.Trp246Ter)

### NM_000030.2(AGXT):c.1049G>A (p.Gly350Asp)

### NM_000030.2(AGXT):c.473C>T (p.Ser158Leu)

### NM_000030.2(AGXT):c.907C>T (p.Gln303Ter)

### NM_000030.2(AGXT):c.996G>A (p.Trp332Ter)

### NM_000030.2(AGXT):c.508G>A (p.Gly170Arg)

[0816] See Table A. Accordingly, an aspect of the invention relates to a method for treating or preventing Primary hyperoxaluria type 1 by correcting one or more pathogenic G-to-A or C-to-T mutations/SNPs, particularly one or more pathogenic G-to-A or C-to-T mutations/SNPs present in the AGXT gene, and more particularly one or more pathogenic G-to-A or C-to-T mutations/SNPs described above.

### Argininosuccinate Lyase Deficiency

[0817] In some embodiments, the methods, systems, and compositions described herein are used to correct one or more pathogenic G-to-A or C-to-T mutations/SNPs associated with Argininosuccinate lyase deficiency. In some embodiment, the pathogenic mutations/SNPs are present in at least the ASL gene, including at least the followings:

### NM_001024943.1(ASL):c.1153C>T (p.Arg385Cys)

### NM_000048.3(ASL):c.532G>A (p.Val178Met)

### NM_000048.3(ASL):c.545G>A (p.Arg182Gln)

### NM_000048.3(ASL):c.175G>A (p.Glu59Lys)

### NM_000048.3(ASL):c.718+5G>A

### NM_000048.3(ASL):c.889C>T (p.Arg297Trp)

### NM_000048.3(ASL):c.1360C>T (p.Gln454Ter)

### NM_000048.3(ASL):c.1060C>T (p.Gln354Ter)

### NM_000048.3(ASL):c.35G>A (p.Arg12Gln)

### NM_000048.3(ASL):c.446+1G>A

### NM_000048.3(ASL):c.544C>T (p.Arg182Ter)

### NM_000048.3(ASL):c.1135C>T (p.Arg379Cys)

[0818] See Table A. Accordingly, an aspect of the invention relates to a method for treating or preventing Argininosuccinate lyase deficiency by correcting one or more pathogenic G-to-A or C-to-T mutations/SNPs, particularly one or more pathogenic G-to-A or C-to-T mutations/SNPs present in the ASL gene, and more particularly one or more pathogenic G-to-A or C-to-T mutations/SNPs described above.

### Ornithine Carbamoyltransferase Deficiency

[0819] In some embodiments, the methods, systems, and compositions described herein are used to correct one or more pathogenic G-to-A or C-to-T mutations/SNPs associated with Ornithine carbamoyltransferase deficiency. In some embodiment, the pathogenic mutations/SNPs are present in at least the OTC gene, including at least the followings:

### NM_000531.5(OTC):c.119G>A (p.Arg40His)

### NM_000531.5(OTC):c.422G>A (p.Arg141Gln)

### NM_000531.5(OTC):c.829C>T (p.Arg277Trp)

### NM_000531.5(OTC):c.674C>T (p.Pro225Leu)

[0820] See Table A. Accordingly, an aspect of the invention relates to a method for treating or preventing Ornithine carbamoyltransferase deficiency by correcting one or more pathogenic G-to-A or C-to-T mutations/SNPs, particularly one or more pathogenic G-to-A or C-to-T mutations/SNPs present in the OTC gene, and more particularly one or more pathogenic G-to-A or C-to-T mutations/SNPs described above.

### Maple Syrup Urine Disease

[0821] In some embodiments, the methods, systems, and compositions described herein are used to correct one or more pathogenic G-to-A or C-to-T mutations/SNPs associated with Maple syrup urine disease. In some embodiment, the pathogenic mutations/SNPs are present in at least one gene selected from BCKDHA, BCKDHB, DBT, and DLD, including at least the followings:

### NM_000709.3(BCKDHA):c.476G>A (p.Arg159Gln)

### NM_183050.3(BCKDHB):c.3G>A (p.MetlIle)

### NM_183050.3(BCKDHB):c.554C>T (p.Pro185Leu)

### NM_001918.3(DBT):c.1033G>A (p.Gly345Arg)

### NM_000709.3(BCKDHA):c.940C>T (p.Arg314Ter)

### NM_000709.3(BCKDHA):c.793C>T (p.Arg265Trp)

### NM_000709.3(BCKDHA):c.868G>A (p.Gly290Arg)

### NM_000108.4(DLD):c.1123G>A (p.Glu375Lys)

### NM_000709.3(BCKDHA):c.1234G>A (p.Val412Met)

### NM_000709.3(BCKDHA):c.288+1G>A

### NM_000709.3(BCKDHA):c.979G>A (p.Glu327Lys)

### NM_001918.3(DBT):c.901C>T (p.Arg301Cys)

### NM_183050.3(BCKDHB):c.509G>A (p.Arg170His)

### NM_183050.3(BCKDHB):c.799C>T (p.Gln267Ter)

### NM_183050.3(BCKDHB):c.853C>T (p.Arg285Ter)

### NM_183050.3(BCKDHB):c.970C>T (p.Arg324Ter)

### NM_183050.3(BCKDHB):c.832G>A (p.Gly278Ser)

### NM_000709.3(BCKDHA):c.1036C>T (p.Arg346Cys)

### NM_000709.3(BCKDHA):c.288+9C>T

### NM_000709.3(BCKDHA):c.632C>T (p.Thr211Met)

### NM_000709.3(BCKDHA):c.659C>T (p.Ala220Val)

### NM_000709.3(BCKDHA):c.964C>T (p.Gln322Ter)

### NM_001918.3(DBT):c.1291C>T (p.Arg431Ter)

### NM_001918.3(DBT):c.251G>A (p.Trp84Ter)

### NM_001918.3(DBT):c.871C>T (p.Arg291Ter)

### NM_000056.4(BCKDHB):c.1016C>T (p.Ser339Leu)

### NM_000056.4(BCKDHB):c.344-1G>A

### NM_000056.4(BCKDHB):c.633+1G>A

### NM_000056.4(BCKDHB):c.952-1G>A

[0822] See Table A. Accordingly, an aspect of the invention relates to a method for treating or preventing Maple syrup urine disease by correcting one or more pathogenic G-to-A or C-to-T mutations/SNPs, particularly one or more pathogenic G-to-A or C-to-T mutations/SNPs present in at least one gene selected from BCKDHA, BCKDHB, DBT, and DLD, and more particularly one or more pathogenic G-to-A or C-to-T mutations/SNPs described above.

### Cancer-Related Diseases

[0823] Pathogenic G-to-A or C-to-T mutations/SNPs associated with various cancers and cancer-related diseases are reported in the ClinVar database and disclosed in Table A, including but not limited to Breast-Ovarian Cancer and Lynch syndrome. Accordingly, an aspect of the invention relates to a method for correcting one or more pathogenic G-to-A or C-to-T mutations/SNPs associated with any of these diseases, as discussed below.

### Breast-Ovarian Cancer

[0824] In some embodiments, the methods, systems, and compositions described herein are used to correct one or more pathogenic G-to-A or C-to-T mutations/SNPs associated with Breast-Ovarian Cancer. In some embodiment, the pathogenic mutations/SNPs are present in at least the BRCA1 or BRCA2 gene, including at least the followings:

### NM_007294.3(BRCA1):c.5095C>T (p.Arg1699Trp)

### NM_000059.3(BRCA2):c.7558C>T (p.Arg2520Ter)

### NM_007294.3(BRCA1):c.2572C>T (p.Gln858Ter)

### NM_007294.3(BRCA1):c.3607C>T (p.Arg1203Ter)

### NM_007294.3(BRCA1):c.5503C>T (p.Arg1835Ter)

### NM_007294.3(BRCA1):c.2059C>T (p.Gln687Ter)

### NM_007294.3(BRCA1):c.4675+1G>A

### NM_007294.3(BRCA1):c.5251C>T (p.Arg1751Ter)

### NM_007294.3(BRCA1):c.5444G>A (p.Trp1815Ter)

### NM_000059.3(BRCA2):c.9318G>A (p.Trp3106Ter)

### NM_000059.3(BRCA2):c.9382C>T (p.Arg3128Ter)

### NM_000059.3(BRCA2):c.274C>T (p.Gln92Ter)

### NM_000059.3(BRCA2):c.6952C>T (p.Arg2318Ter)

### NM_007294.3(BRCA1):c.1687C>T (p.Gln563Ter)

### NM_007294.3(BRCA1):c.2599C>T (p.Gln867Ter)

### NM_007294.3(BRCA1):c.784C>T (p.Gln262Ter)

### NM_007294.3(BRCA1):c.280C>T (p.Gln94Ter)

### NM_007294.3(BRCA1):c.5542C>T (p.Gln1848Ter)

### NM_007294.3(BRCA1):c.5161C>T (p.Gln1721Ter)

### NM_007294.3(BRCA1):c.4573C>T (p.Gln1525Ter)

### NM_007294.3(BRCA1):c.4270C>T (p.Gln1424Ter)

### NM_007294.3(BRCA1):c.4225C>T (p.Gln1409Ter)

### NM_007294.3(BRCA1):c.4066C>T (p.Gln1356Ter)

### NM_007294.3(BRCA1):c.3679C>T (p.Gln1227Ter)

### NM_007294.3(BRCA1):c.1918C>T (p.Gln640Ter)

### NM_007294.3(BRCA1):c.963G>A (p.Trp321Ter)

### NM_007294.3(BRCA1):c.718C>T (p.Gln240Ter)

### NM_000059.3(BRCA2):c.9196C>T (p.Gln3066Ter)

### NM_000059.3(BRCA2):c.9154C>T (p.Arg3052Trp)

### NM_007294.3(BRCA1):c.3991C>T (p.Gln1331Ter)

### NM_007294.3(BRCA1):c.4097-1G>A

### NM_007294.3(BRCA1):c.1059G>A (p.Trp353Ter)

### NM_007294.3(BRCA1):c.1115G>A (p.Trp372Ter)

### NM_007294.3(BRCA1):c.1138C>T (p.Gln380Ter)

### NM_007294.3(BRCA1):c.1612C>T (p.Gln538Ter)

### NM_007294.3(BRCA1):c.1621C>T (p.Gln541Ter)

### NM_007294.3(BRCA1):c.1630C>T (p.Gln544Ter)

### NM_007294.3(BRCA1):c.178C>T (p.Gln60Ter)

### NM_007294.3(BRCA1):c.1969C>T (p.Gln657Ter)

### NM_007294.3(BRCA1):c.2275C>T (p.Gln759Ter)

### NM_007294.3(BRCA1):c.2410C>T (p.Gln804Ter)

### NM_007294.3(BRCA1):c.2869C>T (p.Gln957Ter)

### NM_007294.3(BRCA1):c.2923C>T (p.Gln975Ter)

### NM_007294.3(BRCA1):c.3268C>T (p.Gln1090Ter)

### NM_007294.3(BRCA1):c.3430C>T (p.Gln1144Ter)

### NM_007294.3(BRCA1):c.3544C>T (p.Gln1182Ter)

### NM_007294.3(BRCA1):c.4075C>T (p.Gln1359Ter)

### NM_007294.3(BRCA1):c.4201C>T (p.Gln1401Ter)

### NM_007294.3(BRCA1):c.4399C>T (p.Gln1467Ter)

### NM_007294.3(BRCA1):c.4552C>T (p.Gln1518Ter)

### NM_007294.3(BRCA1):c.5054C>T (p.Thr1685Ile)

### NM_007294.3(BRCA1):c.514C>T (p.Gln172Ter)

### NM_007294.3(BRCA1):c.5239C>T (p.Gln1747Ter)

### NM_007294.3(BRCA1):c.5266C>T (p.Gln1756Ter)

### NM_007294.3(BRCA1):c.5335C>T (p.Gln1779Ter)

### NM_007294.3(BRCA1):c.5345G>A (p.Trp1782Ter)

### NM_007294.3(BRCA1):c.5511G>A (p.Trp1837Ter)

### NM_007294.3(BRCA1):c.5536C>T (p.Gln1846Ter)

### NM_007294.3(BRCA1):c.55C>T (p.Gln19Ter)

### NM_007294.3(BRCA1):c.949C>T (p.Gln317Ter)

### NM_007294.3(BRCA1):c.928C>T (p.Gln310Ter)

### NM_007294.3(BRCA1):c.5117G>A (p.Gly1706Glu)

### NM_007294.3(BRCA1):c.5136G>A (p.Trp1712Ter)

### NM_007294.3(BRCA1):c.4327C>T (p.Arg1443Ter)

### NM_007294.3(BRCA1):c.1471C>T (p.Gln491Ter)

### NM_007294.3(BRCA1):c.1576C>T (p.Gln526Ter)

### NM_007294.3(BRCA1):c.160C>T (p.Gln54Ter)

### NM_007294.3(BRCA1):c.2683C>T (p.Gln895Ter)

### NM_007294.3(BRCA1):c.2761C>T (p.Gln921Ter)

### NM_007294.3(BRCA1):c.3895C>T (p.Gln1299Ter)

### NM_007294.3(BRCA1):c.4339C>T (p.Gln1447Ter)

### NM_007294.3(BRCA1):c.4372C>T (p.Gln1458Ter)

### NM_007294.3(BRCA1):c.5153G>A (p.Trp1718Ter)

### NM_007294.3(BRCA1):c.5445G>A (p.Trp1815Ter)

### NM_007294.3(BRCA1):c.5510G>A (p.Trp1837Ter)

### NM_007294.3(BRCA1):c.5346G>A (p.Trp1782Ter)

### NM_007294.3(BRCA1):c.1116G>A (p.Trp372Ter)

### NM_007294.3(BRCA1):c.1999C>T (p.Gln667Ter)

### NM_007294.3(BRCA1):c.4183C>T (p.Gln1395Ter)

### NM_007294.3(BRCA1):c.4810C>T (p.Gln1604Ter)

### NM_007294.3(BRCA1):c.850C>T (p.Gln284Ter)

### NM_007294.3(BRCA1):c.1058G>A (p.Trp353Ter)

### NM_007294.3(BRCA1):c.131G>A (p.Cys44Tyr)

### NM_007294.3(BRCA1):c.1600C>T (p.Gln534Ter)

### NM_007294.3(BRCA1):c.3286C>T (p.Gln1096Ter)

### NM_007294.3(BRCA1):c.3403C>T (p.Gln1135Ter)

### NM_007294.3(BRCA1):c.34C>T (p.Gln12Ter)

### NM_007294.3(BRCA1):c.4258C>T (p.Gln1420Ter)

### NM_007294.3(BRCA1):c.4609C>T (p.Gln1537Ter)

### NM_007294.3(BRCA1):c.5154G>A (p.Trp1718Ter)

### NM_007294.3(BRCA1):c.5431C>T (p.Gln1811Ter)

### NM_007294.3(BRCA1):c.241C>T (p.Gln81Ter)

### NM_007294.3(BRCA1):c.3331C>T (p.Gln1111Ter)

### NM_007294.3(BRCA1):c.3967C>T (p.Gln1323Ter)

### NM_007294.3(BRCA1):c.415C>T (p.Gln139Ter)

### NM_007294.3(BRCA1):c.505C>T (p.Gln169Ter)

### NM_007294.3(BRCA1):c.5194-12G>A

### NM_007294.3(BRCA1):c.5212G>A (p.Gly1738Arg)

### NM_007294.3(BRCA1):c.5332+1G>A

### NM_007294.3(BRCA1):c.1480C>T (p.Gln494Ter)

### NM_007294.3(BRCA1):c.2563C>T (p.Gln855Ter)

### NM_007294.3(BRCA1):c.1066C>T (p.Gln356Ter)

### NM_007294.3(BRCA1):c.3718C>T (p.Gln1240Ter)

### NM_007294.3(BRCA1):c.3817C>T (p.Gln1273Ter)

### NM_007294.3(BRCA1):c.3937C>T (p.Gln1313Ter)

### NM_007294.3(BRCA1):c.4357+1G>A

### NM_007294.3(BRCA1):c.5074+1G>A

### NM_007294.3(BRCA1):c.5277+1G>A

### NM_007294.3(BRCA1):c.2338C>T (p.Gln780Ter)

### NM_007294.3(BRCA1):c.3598C>T (p.Gln1200Ter)

### NM_007294.3(BRCA1):c.3841C>T (p.Gln1281Ter)

### NM_007294.3(BRCA1):c.4222C>T (p.Gln1408Ter)

### NM_007294.3(BRCA1):c.4524G>A (p.Trp1508Ter)

### NM_007294.3(BRCA1):c.5353C>T (p.Gln1785Ter)

### NM_007294.3(BRCA1):c.962G>A (p.Trp321Ter)

### NM_007294.3(BRCA1):c.220C>T (p.Gln74Ter)

### NM_007294.3(BRCA1):c.2713C>T (p.Gln905Ter)

### NM_007294.3(BRCA1):c.2800C>T (p.Gln934Ter)

### NM_007294.3(BRCA1):c.4612C>T (p.Gln1538Ter)

### NM_007294.3(BRCA1):c.3352C>T (p.Gln1118Ter)

### NM_007294.3(BRCA1):c.4834C>T (p.Gln1612Ter)

### NM_007294.3(BRCA1):c.4523G>A (p.Trp1508Ter)

### NM_007294.3(BRCA1):c.5135G>A (p.Trp1712Ter)

### NM_007294.3(BRCA1):c.1155G>A (p.Trp385Ter)

### NM_007294.3(BRCA1):c.4987-1G>A

### NM_000059.3(BRCA2):c.9573G>A (p.Trp3191Ter)

### NM_000059.3(BRCA2):c.1945C>T (p.Gln649Ter)

### NM_000059.3(BRCA2):c.217C>T (p.Gln73Ter)

### NM_000059.3(BRCA2):c.523C>T (p.Gln175Ter)

### NM_000059.3(BRCA2):c.2548C>T (p.Gln850Ter)

### NM_000059.3(BRCA2):c.2905C>T (p.Gln969Ter)

### NM_000059.3(BRCA2):c.4689G>A (p.Trp1563Ter)

### NM_000059.3(BRCA2):c.4972C>T (p.Gln1658Ter)

### NM_000059.3(BRCA2):c.1184G>A (p.Trp395Ter)

### NM_000059.3(BRCA2):c.2137C>T (p.Gln713Ter)

### NM_000059.3(BRCA2):c.3217C>T (p.Gln1073Ter)

### NM_000059.3(BRCA2):c.3523C>T (p.Gln1175Ter)

### NM_000059.3(BRCA2):c.4783C>T (p.Gln1595Ter)

### NM_000059.3(BRCA2):c.5800C>T (p.Gln1934Ter)

### NM_000059.3(BRCA2):c.6478C>T (p.Gln2160Ter)

### NM_000059.3(BRCA2):c.7033C>T (p.Gln2345Ter)

### NM_000059.3(BRCA2):c.7495C>T (p.Gln2499Ter)

### NM_000059.3(BRCA2):c.7501C>T (p.Gln2501Ter)

### NM_000059.3(BRCA2):c.7887G>A (p.Trp2629Ter)

### NM_000059.3(BRCA2):c.8910G>A (p.Trp2970Ter)

### NM_000059.3(BRCA2):c.9139C>T (p.Gln3047Ter)

### NM_000059.3(BRCA2):c.9739C>T (p.Gln3247Ter)

### NM_000059.3(BRCA2):c.582G>A (p.Trp194Ter)

### NM_000059.3(BRCA2):c.7963C>T (p.Gln2655Ter)

### NM_000059.3(BRCA2):c.8695C>T (p.Gln2899Ter)

### NM_000059.3(BRCA2):c.8869C>T (p.Gln2957Ter)

### NM_000059.3(BRCA2):c.1117C>T (p.Gln373Ter)

### NM_000059.3(BRCA2):c.1825C>T (p.Gln609Ter)

### NM_000059.3(BRCA2):c.2455C>T (p.Gln819Ter)

### NM_000059.3(BRCA2):c.2881C>T (p.Gln961Ter)

### NM_000059.3(BRCA2):c.3265C>T (p.Gln1089Ter)

### NM_000059.3(BRCA2):c.3283C>T (p.Gln1095Ter)

### NM_000059.3(BRCA2):c.3442C>T (p.Gln1148Ter)

### NM_000059.3(BRCA2):c.3871C>T (p.Gln1291Ter)

### NM_000059.3(BRCA2):c.439C>T (p.Gln147Ter)

### NM_000059.3(BRCA2):c.4525C>T (p.Gln1509Ter)

### NM_000059.3(BRCA2):c.475+1G>A

### NM_000059.3(BRCA2):c.5344C>T (p.Gln1782Ter)

### NM_000059.3(BRCA2):c.5404C>T (p.Gln1802Ter)

### NM_000059.3(BRCA2):c.5773C>T (p.Gln1925Ter)

### NM_000059.3(BRCA2):c.5992C>T (p.Gln1998Ter)

### NM_000059.3(BRCA2):c.6469C>T (p.Gln2157Ter)

### NM_000059.3(BRCA2):c.7261C>T (p.Gln2421Ter)

### NM_000059.3(BRCA2):c.7303C>T (p.Gln2435Ter)

### NM_000059.3(BRCA2):c.7471C>T (p.Gln2491Ter)

### NM_000059.3(BRCA2):c.7681C>T (p.Gln2561Ter)

### NM_000059.3(BRCA2):c.7738C>T (p.Gln2580Ter)

### NM_000059.3(BRCA2):c.7886G>A (p.Trp2629Ter)

### NM_000059.3(BRCA2):c.8140C>T (p.Gln2714Ter)

### NM_000059.3(BRCA2):c.8363G>A (p.Trp2788Ter)

### NM_000059.3(BRCA2):c.8572C>T (p.Gln2858Ter)

### NM_000059.3(BRCA2):c.8773C>T (p.Gln2925Ter)

### NM_000059.3(BRCA2):c.8821C>T (p.Gln2941Ter)

### NM_000059.3(BRCA2):c.9109C>T (p.Gln3037Ter)

### NM_000059.3(BRCA2):c.9317G>A (p.Trp3106Ter)

### NM_000059.3(BRCA2):c.9466C>T (p.Gln3156Ter)

### NM_000059.3(BRCA2):c.9572G>A (p.Trp3191Ter)

### NM_000059.3(BRCA2):c.8490G>A (p.Trp2830Ter)

### NM_000059.3(BRCA2):c.5980C>T (p.Gln1994Ter)

### NM_000059.3(BRCA2):c.7721G>A (p.Trp2574Ter)

### NM_000059.3(BRCA2):c.196C>T (p.Gln66Ter)

### NM_000059.3(BRCA2):c.7618-1G>A

### NM_000059.3(BRCA2):c.8489G>A (p.Trp2830Ter)

### NM_000059.3(BRCA2):c.7857G>A (p.Trp2619Ter)

### NM_000059.3(BRCA2):c.1261C>T (p.Gln421Ter)

### NM_000059.3(BRCA2):c.1456C>T (p.Gln486Ter)

### NM_000059.3(BRCA2):c.3319C>T (p.Gln1107Ter)

### NM_000059.3(BRCA2):c.5791C>T (p.Gln1931Ter)

### NM_000059.3(BRCA2):c.6070C>T (p.Gln2024Ter)

### NM_000059.3(BRCA2):c.7024C>T (p.Gln2342Ter)

### NM_000059.3(BRCA2):c.961C>T (p.Gln321Ter)

### NM_000059.3(BRCA2):c.9380G>A (p.Trp3127Ter)

### NM_000059.3(BRCA2):c.8364G>A (p.Trp2788Ter)

### NM_000059.3(BRCA2):c.7758G>A (p.Trp2586Ter)

### NM_000059.3(BRCA2):c.2224C>T (p.Gln742Ter)

### NM_000059.3(BRCA2):c.5101C>T (p.Gln1701Ter)

### NM_000059.3(BRCA2):c.5959C>T (p.Gln1987Ter)

### NM_000059.3(BRCA2):c.7060C>T (p.Gln2354Ter)

### NM_000059.3(BRCA2):c.9100C>T (p.Gln3034Ter)

### NM_000059.3(BRCA2):c.9148C>T (p.Gln3050Ter)

### NM_000059.3(BRCA2):c.9883C>T (p.Gln3295Ter)

### NM_000059.3(BRCA2):c.1414C>T (p.Gln472Ter)

### NM_000059.3(BRCA2):c.1689G>A (p.Trp563Ter)

### NM_000059.3(BRCA2):c.581G>A (p.Trp194Ter)

### NM_000059.3(BRCA2):c.6490C>T (p.Gln2164Ter)

### NM_000059.3(BRCA2):c.7856G>A (p.Trp2619Ter)

### NM_000059.3(BRCA2):c.8970G>A (p.Trp2990Ter)

### NM_000059.3(BRCA2):c.92G>A (p.Trp31Ter)

### NM_000059.3(BRCA2):c.9376C>T (p.Gln3126Ter)

### NM_000059.3(BRCA2):c.93G>A (p.Trp31Ter)

### NM_000059.3(BRCA2):c.1189C>T (p.Gln397Ter)

### NM_000059.3(BRCA2):c.2818C>T (p.Gln940Ter)

### NM_000059.3(BRCA2):c.2979G>A (p.Trp993Ter)

### NM_000059.3(BRCA2):c.3166C>T (p.Gln1056Ter)

### NM_000059.3(BRCA2):c.4285C>T (p.Gln1429Ter)

### NM_000059.3(BRCA2):c.6025C>T (p.Gln2009Ter)

### NM_000059.3(BRCA2):c.772C>T (p.Gln258Ter)

### NM_000059.3(BRCA2):c.7877G>A (p.Trp2626Ter)

### NM_000059.3(BRCA2):c.3109C>T (p.Gln1037Ter)

### NM_000059.3(BRCA2):c.4222C>T (p.Gln1408Ter)

### NM_000059.3(BRCA2):c.7480C>T (p.Arg2494Ter)

### NM_000059.3(BRCA2):c.7878G>A (p.Trp2626Ter)

### NM_000059.3(BRCA2):c.9076C>T (p.Gln3026Ter)

### NM_000059.3(BRCA2):c.1855C>T (p.Gln619Ter)

### NM_000059.3(BRCA2):c.4111C>T (p.Gln1371Ter)

### NM_000059.3(BRCA2):c.5656C>T (p.Gln1886Ter)

### NM_000059.3(BRCA2):c.7757G>A (p.Trp2586Ter)

### NM_000059.3(BRCA2):c.8243G>A (p.Gly2748Asp)

### NM_000059.3(BRCA2):c.8878C>T (p.Gln2960Ter)

### NM_000059.3(BRCA2):c.8487+1G>A

### NM_000059.3(BRCA2):c.8677C>T (p.Gln2893Ter)

### NM_000059.3(BRCA2):c.250C>T (p.Gln84Ter)

### NM_000059.3(BRCA2):c.6124C>T (p.Gln2042Ter)

### NM_000059.3(BRCA2):c.7617+1G>A

### NM_000059.3(BRCA2):c.8575C>T (p.Gln2859Ter)

### NM_000059.3(BRCA2):c.8174G>A (p.Trp2725Ter)

### NM_000059.3(BRCA2):c.3187C>T (p.Gln1063Ter)

### NM_000059.3(BRCA2):c.9381G>A (p.Trp3127Ter)

### NM_000059.3(BRCA2):c.2095C>T (p.Gln699Ter)

### NM_000059.3(BRCA2):c.1642C>T (p.Gln548Ter)

### NM_000059.3(BRCA2):c.8608C>T (p.Gln2870Ter)

### NM_000059.3(BRCA2):c.3412C>T (p.Gln1138Ter)

### NM_000059.3(BRCA2):c.4246C>T (p.Gln1416Ter)

### NM_000059.3(BRCA2):c.6475C>T (p.Gln2159Ter)

### NM_000059.3(BRCA2):c.7366C>T (p.Gln2456Ter)

### NM_000059.3(BRCA2):c.7516C>T (p.Gln2506Ter)

### NM_000059.3(BRCA2):c.8969G>A (p.Trp2990Ter)

### NM_000059.3(BRCA2):c.6487C>T (p.Gln2163Ter)

### NM_000059.3(BRCA2):c.2978G>A (p.Trp993Ter)

### NM_000059.3(BRCA2):c.7615C>T (p.Gln2539Ter)

### NM_000059.3(BRCA2):c.9106C>T (p.Gln3036Ter)

[0825] See Table A. Accordingly, an aspect of the invention relates to a method for treating or preventing Breast-Ovarian Cancer by correcting one or more pathogenic G-to-A or C-to-T mutations/SNPs, particularly one or more pathogenic G-to-A or C-to-T mutations/SNPs present in the BRCA1 or BRCA2 gene, and more particularly one or more pathogenic G-to-A or C-to-T mutations/SNPs described above.

### Lynch Syndrome

[0826] In some embodiments, the methods, systems, and compositions described herein are used to correct one or more pathogenic G-to-A or C-to-T mutations/SNPs associated with Lynch syndrome. In some embodiment, the pathogenic mutations/SNPs are present in at least one gene selected from MSH6, MSH2, EPCAM, PMS2, and MLH1, including at least the followings:

### NM_000179.2(MSH6):c.1045C>T (p.Gln349Ter)

### NM_000251.2(MSH2):c.1384C>T (p.Gln462Ter)

### NM_002354.2(EPCAM):c.133C>T (p.Gln45Ter)

### NM_002354.2(EPCAM):c.429G>A (p.Trp143Ter)

### NM_002354.2(EPCAM):c.523C>T (p.Gln175Ter)

### NM_000179.2(MSH6):c.2680C>T (p.Gln894Ter)

### NM_000251.2(MSH2):c.350G>A (p.Trp117Ter)

### NM_000179.2(MSH6):c.2735G>A (p.Trp912Ter)

### NM_000179.2(MSH6):c.3556+1G>A

### NM_000251.2(MSH2):c.388C>T (p.Gln130Ter)

### NM_000535.6(PMS2):c.1912C>T (p.Gln638Ter)

### NM_000535.6(PMS2):c.1891C>T (p.Gln631Ter)

### NM_000249.3(MLH1):c.454-1G>A

### NM_000251.2(MSH2):c.1030C>T (p.Gln344Ter)

### NM_000179.2(MSH6):c.2330G>A (p.Trp777Ter)

### NM_000179.2(MSH6):c.2191C>T (p.Gln731Ter)

### NM_000179.2(MSH6):c.2764C>T (p.Arg922Ter)

### NM_000179.2(MSH6):c.2815C>T (p.Gln939Ter)

### NM_000179.2(MSH6):c.3020G>A (p.Trp1007Ter)

### NM_000179.2(MSH6):c.3436C>T (p.Gln1146Ter)

### NM_000179.2(MSH6):c.3647-1G>A

### NM_000179.2(MSH6):c.3772C>T (p.Gln1258Ter)

### NM_000179.2(MSH6):c.3838C>T (p.Gln1280Ter)

### NM_000179.2(MSH6):c.706C>T (p.Gln236Ter)

### NM_000179.2(MSH6):c.730C>T (p.Gln244Ter)

### NM_000249.3(MLH1):c.1171C>T (p.Gln391Ter)

### NM_000249.3(MLH1):c.1192C>T (p.Gln398Ter)

### NM_000249.3(MLH1):c.1225C>T (p.Gln409Ter)

### NM_000249.3(MLH1):c.1276C>T (p.Gln426Ter)

### NM_000249.3(MLH1):c.1528C>T (p.Gln510Ter)

### NM_000249.3(MLH1):c.1609C>T (p.Gln537Ter)

### NM_000249.3(MLH1):c.1613G>A (p.Trp538Ter)

### NM_000249.3(MLH1):c.1614G>A (p.Trp538Ter)

### NM_000249.3(MLH1):c.1624C>T (p.Gln542Ter)

### NM_000249.3(MLH1):c.1684C>T (p.Gln562Ter)

### NM_000249.3(MLH1):c.1731+1G>A

### NM_000249.3(MLH1):c.1731+5G>A

### NM_000249.3(MLH1):c.1732-1G>A

### NM_000249.3(MLH1):c.1896G>A (p.Glu632=)

### NM_000249.3(MLH1):c.1989+1G>A

### NM_000249.3(MLH1):c.1990-1G>A

### NM_000249.3(MLH1):c.1998G>A (p.Trp666Ter)

### NM_000249.3(MLH1):c.208-1G>A

### NM_000249.3(MLH1):c.2101C>T (p.Gln701Ter)

### NM_000249.3(MLH1):c.2136G>A (p.Trp712Ter)

### NM_000249.3(MLH1):c.2224C>T (p.Gln742Ter)

### NM_000249.3(MLH1):c.230G>A (p.Cys77Tyr)

### NM_000249.3(MLH1):c.256C>T (p.Gln86Ter)

### NM_000249.3(MLH1):c.436C>T (p.Gln146Ter)

### NM_000249.3(MLH1):c.445C>T (p.Gln149Ter)

### NM_000249.3(MLH1):c.545G>A (p.Arg182Lys)

### NM_000249.3(MLH1):c.731G>A (p.Gly244Asp)

### NM_000249.3(MLH1):c.76C>T (p.Gln26Ter)

### NM_000249.3(MLH1):c.842C>T (p.Ala281Val)

### NM_000249.3(MLH1):c.882C>T (p.Leu294=)

### NM_000249.3(MLH1):c.901C>T (p.Gln301Ter)

### NM_000251.2(MSH2):c.1013G>A (p.Gly338Glu)

### NM_000251.2(MSH2):c.1034G>A (p.Trp345Ter)

### NM_000251.2(MSH2):c.1129C>T (p.Gln377Ter)

### NM_000251.2(MSH2):c.1183C>T (p.Gln395Ter)

### NM_000251.2(MSH2):c.1189C>T (p.Gln397Ter)

### NM_000251.2(MSH2):c.1204C>T (p.Gln402Ter)

### NM_000251.2(MSH2):c.1276+1G>A

### NM_000251.2(MSH2):c.1528C>T (p.Gln510Ter)

### NM_000251.2(MSH2):c.1552C>T (p.Gln518Ter)

### NM_000251.2(MSH2):c.1720C>T (p.Gln574Ter)

### NM_000251.2(MSH2):c.1777C>T (p.Gln593Ter)

### NM_000251.2(MSH2):c.1885C>T (p.Gln629Ter)

### NM_000251.2(MSH2):c.2087C>T (p.Pro696Leu)

[0827] NM_000251.2(MSH2):c.2251G>A (p. Gly751Arg)

### NM_000251.2(MSH2):c.2291G>A (p.Trp764Ter)

### NM_000251.2(MSH2):c.2292G>A (p.Trp764Ter)

### NM_000251.2(MSH2):c.2446C>T (p.Gln816Ter)

### NM_000251.2(MSH2):c.2470C>T (p.Gln824Ter)

### NM_000251.2(MSH2):c.2536C>T (p.Gln846Ter)

### NM_000251.2(MSH2):c.2581C>T (p.Gln861Ter)

### NM_000251.2(MSH2):c.2634G>A (p.Glu878=)

### NM_000251.2(MSH2):c.2635C>T (p.Gln879Ter)

### NM_000251.2(MSH2):c.28C>T (p.Gln10Ter)

### NM_000251.2(MSH2):c.472C>T (p.Gln158Ter)

### NM_000251.2(MSH2):c.478C>T (p.Gln160Ter)

### NM_000251.2(MSH2):c.484G>A (p.Gly162Arg)

### NM_000251.2(MSH2):c.490G>A (p.Gly164Arg)

### NM_000251.2(MSH2):c.547C>T (p.Gln183Ter)

### NM_000251.2(MSH2):c.577C>T (p.Gln193Ter)

### NM_000251.2(MSH2):c.643C>T (p.Gln215Ter)

### NM_000251.2(MSH2):c.645+1G>A

### NM_000251.2(MSH2):c.652C>T (p.Gln218Ter)

### NM_000251.2(MSH2):c.754C>T (p.Gln252Ter)

### NM_000251.2(MSH2):c.792+1G>A

### NM_000251.2(MSH2):c.942G>A (p.Gln314=)

### NM_000535.6(PMS2):c.949C>T (p.Gln317Ter)

### NM_000249.3(MLH1):c.306+1G>A

### NM_000249.3(MLH1):c.62C>T (p.Ala21Val)

### NM_000251.2(MSH2):c.1865C>T (p.Pro622Leu)

### NM_000179.2(MSH6):c.426G>A (p.Trp142Ter)

### NM_000251.2(MSH2):c.715C>T (p.Gln239Ter)

### NM_000249.3(MLH1):c.350C>T (p.Thr117Met)

### NM_000251.2(MSH2):c.1915C>T (p.His639Tyr)

### NM_000251.2(MSH2):c.289C>T (p.Gln97Ter)

### NM_000251.2(MSH2):c.2785C>T (p.Arg929Ter)

### NM_000249.3(MLH1):c.131C>T (p.Ser44Phe)

### NM_000249.3(MLH1):c.1219C>T (p.Gln407Ter)

### NM_000249.3(MLH1):c.306+5G>A

### NM_000251.2(MSH2):c.1801C>T (p.Gln601Ter)

### NM_000535.6(PMS2):c.1144+1G>A

### NM_000251.2(MSH2):c.1984C>T (p.Gln662Ter)

### NM_000249.3(MLH1):c.381-1G>A

### NM_000535.6(PMS2):c.631C>T (p.Arg211Ter)

### NM_000251.2(MSH2):c.790C>T (p.Gln264Ter)

### NM_000251.2(MSH2):c.366+1G>A

### NM_000249.3(MLH1):c.298C>T (p.Arg100Ter)

### NM_000179.2(MSH6):c.3013C>T (p.Arg1005Ter)

### NM_000179.2(MSH6):c.694C>T (p.Gln232Ter)

### NM_000179.2(MSH6):c.742C>T (p.Arg248Ter)

### NM_000249.3(MLH1):c.1039-1G>A

### NM_000249.3(MLH1):c.142C>T (p.Gln48Ter)

### NM_000249.3(MLH1):c.1790G>A (p.Trp597Ter)

### NM_000249.3(MLH1):c.1961C>T (p.Pro654Leu)

### NM_000249.3(MLH1):c.2103+1G>A

### NM_000249.3(MLH1):c.2135G>A (p.Trp712Ter)

### NM_000249.3(MLH1):c.588+5G>A

### NM_000249.3(MLH1):c.790+1G>A

### NM_000251.2(MSH2):c.1035G>A (p.Trp345Ter)

### NM_000251.2(MSH2):c.1255C>T (p.Gln419Ter)

### NM_000251.2(MSH2):c.1861C>T (p.Arg621Ter)

### NM_000251.2(MSH2):c.226C>T (p.Gln76Ter)

### NM_000251.2(MSH2):c.2653C>T (p.Gln885Ter)

### NM_000251.2(MSH2):c.508C>T (p.Gln170Ter)

### NM_000251.2(MSH2):c.862C>T (p.Gln288Ter)

### NM_000251.2(MSH2):c.892C>T (p.Gln298Ter)

### NM_000251.2(MSH2):c.970C>T (p.Gln324Ter)

### NM_000179.2(MSH6):c.4001G>A (p.Arg1334Gln)

### NM_000251.2(MSH2):c.1662-1G>A

### NM_000535.6(PMS2):c.1882C>T (p.Arg628Ter)

### NM_000535.6(PMS2):c.2174+1G>A

### NM_000535.6(PMS2):c.2404C>T (p.Arg802Ter)

### NM_000179.2(MSH6):c.3991C>T (p.Arg1331Ter)

### NM_000179.2(MSH6):c.2503C>T (p.Gln835Ter)

### NM_000179.2(MSH6):c.718C>T (p.Arg240Ter)

### NM_000249.3(MLH1):c.1038G>A (p.Gln346=)

### NM_000249.3(MLH1):c.245C>T (p.Thr82Ile)

### NM_000249.3(MLH1):c.83C>T (p.Pro28Leu)

### NM_000249.3(MLH1):c.884G>A (p.Ser295Asn)

### NM_000249.3(MLH1):c.982C>T (p.Gln328Ter)

### NM_000251.2(MSH2):c.1046C>T (p.Pro349Leu)

### NM_000251.2(MSH2):c.1120C>T (p.Gln374Ter)

### NM_000251.2(MSH2):c.1285C>T (p.Gln429Ter)

### NM_000251.2(MSH2):c.1477C>T (p.Gln493Ter)

### NM_000251.2(MSH2):c.2152C>T (p.Gln718Ter)

### NM_000535.6(PMS2):c.703C>T (p.Gln235Ter)

### NM_000249.3(MLH1):c.2141G>A (p.Trp714Ter)

### NM_000251.2(MSH2):c.1009C>T (p.Gln337Ter)

### NM_000251.2(MSH2):c.1216C>T (p.Arg406Ter)

### NM_000179.2(MSH6):c.3202C>T (p.Arg1068Ter)

### NM_000251.2(MSH2):c.1165C>T (p.Arg389Ter)

### NM_000249.3(MLH1):c.1943C>T (p.Pro648Leu)

### NM_000249.3(MLH1):c.200G>A (p.Gly67Glu)

### NM_000249.3(MLH1):c.793C>T (p.Arg265Cys)

### NM_000249.3(MLH1):c.2059C>T (p.Arg687Trp)

### NM_000249.3(MLH1):c.677G>A (p.Arg226Gln)

### NM_000249.3(MLH1):c.2041G>A (p.Ala681Thr)

### NM_000249.3(MLH1):c.1942C>T (p.Pro648Ser)

### NM_000249.3(MLH1):c.676C>T (p.Arg226Ter)

### NM_000251.2(MSH2):c.2038C>T (p.Arg680Ter)

### NM_000179.2(MSH6):c.1483C>T (p.Arg495Ter)

### NM_000179.2(MSH6):c.2194C>T (p.Arg732Ter)

### NM_000179.2(MSH6):c.3103C>T (p.Arg1035Ter)

### NM_000179.2(MSH6):c.892C>T (p.Arg298Ter)

### NM_000249.3(MLH1):c.1459C>T (p.Arg487Ter)

### NM_000249.3(MLH1):c.1731G>A (p.Ser577=)

### NM_000249.3(MLH1):c.184C>T (p.Gln62Ter)

### NM_000249.3(MLH1):c.1975C>T (p.Arg659Ter)

### NM_000249.3(MLH1):c.199G>A (p.Gly67Arg)

### NM_000251.2(MSH2):c.1076+1G>A

### NM_000251.2(MSH2):c.1147C>T (p.Arg383Ter)

### NM_000251.2(MSH2):c.181C>T (p.Gln61Ter)

### NM_000251.2(MSH2):c.212-1G>A

### NM_000251.2(MSH2):c.2131C>T (p.Arg711Ter)

### NM_000535.6(PMS2):c.697C>T (p.Gln233Ter)

### NM_000535.6(PMS2):c.1261C>T (p.Arg421Ter)

### NM_000251.2(MSH2):c.2047G>A (p.Gly683Arg)

### NM_000535.6(PMS2):c.400C>T (p.Arg134Ter)

### NM_000535.6(PMS2):c.1927C>T (p.Gln643Ter)

### NM_000179.2(MSH6):c.1444C>T (p.Arg482Ter)

### NM_000179.2(MSH6):c.2731C>T (p.Arg911Ter)

### NM_000535.6(PMS2):c.943C>T (p.Arg315Ter)

[0828] See Table A. Accordingly, an aspect of the invention relates to a method for treating or preventing Lynch syndrome by correcting one or more pathogenic G-to-A or C-to-T mutations/SNPs, particularly one or more pathogenic G-to-A or C-to-T mutations/SNPs present in at least one gene selected from BCKDHA, BCKDHB, DBT, and DLD, and more particularly one or more pathogenic G-to-A or C-to-T mutations/SNPs described above.

### Other Genetic Diseases

[0829] Pathogenic G-to-A or C-to-T mutations/SNPs associated with additional genetic diseases are also reported in the ClinVar database and disclosed in Table A, including but not limited to Marfan syndrome, Hurler syndrome, Glycogen Storage Disease, and Cystic Fibrosis. Accordingly, an aspect of the invention relates to a method for correcting one or more pathogenic G-to-A or C-to-T mutations/SNPs associated with any of these diseases, as discussed below.

### Marfan Syndrome

[0830] In some embodiments, the methods, systems, and compositions described herein are used to correct one or more pathogenic G-to-A or C-to-T mutations/SNPs associated with Marfan syndrome. In some embodiment, the pathogenic mutations/SNPs are present in at least the FBN1 gene, including at least the followings:

### NM_000138.4(FBN1):c.1879C>T (p.Arg627Cys)

### NM_000138.4(FBN1):c.1051C>T (p.Gln351Ter)

### NM_000138.4(FBN1):c.184C>T (p.Arg62Cys)

### NM_000138.4(FBN1):c.2855-1G>A

### NM_000138.4(FBN1):c.3164G>A (p.Cys1055Tyr)

### NM_000138.4(FBN1):c.368G>A (p.Cys123Tyr)

### NM_000138.4(FBN1):c.4955G>A (p.Cys1652Tyr)

### NM_000138.4(FBN1):c.7180C>T (p.Arg2394Ter)

### NM_000138.4(FBN1):c.8267G>A (p.Trp2756Ter)

### NM_000138.4(FBN1):c.1496G>A (p.Cys499Tyr)

### NM_000138.4(FBN1):c.6886C>T (p.Gln2296Ter)

### NM_000138.4(FBN1):c.3373C>T (p.Arg1125Ter)

### NM_000138.4(FBN1):c.640G>A (p.Gly214Ser)

### NM_000138.4(FBN1):c.5038C>T (p.Gln1680Ter)

### NM_000138.4(FBN1):c.434G>A (p.Cys145Tyr)

### NM_000138.4(FBN1):c.2563C>T (p.Gln855Ter)

### NM_000138.4(FBN1):c.7466G>A (p.Cys2489Tyr)

### NM_000138.4(FBN1):c.2089C>T (p.Gln697Ter)

### NM_000138.4(FBN1):c.592C>T (p.Gln198Ter)

### NM_000138.4(FBN1):c.6695G>A (p.Cys2232Tyr)

### NM_000138.4(FBN1):c.6164-1G>A

### NM_000138.4(FBN1):c.5627G>A (p.Cys1876Tyr)

### NM_000138.4(FBN1):c.4061G>A (p.Trp1354Ter)

### NM_000138.4(FBN1):c.1982G>A (p.Cys661Tyr)

### NM_000138.4(FBN1):c.6784C>T (p.Gln2262Ter)

### NM_000138.4(FBN1):c.409C>T (p.Gln137Ter)

### NM_000138.4(FBN1):c.364C>T (p.Arg122Cys)

### NM_000138.4(FBN1):c.3217G>A (p.Glu1073Lys)

### NM_000138.4(FBN1):c.4460-8G>A

### NM_000138.4(FBN1):c.4786C>T (p.Arg1596Ter)

### NM_000138.4(FBN1):c.7806G>A (p.Trp2602Ter)

### NM_000138.4(FBN1):c.247+1G>A

### NM_000138.4(FBN1):c.2495G>A (p.Cys832Tyr)

### NM_000138.4(FBN1):c.493C>T (p.Arg165Ter)

### NM_000138.4(FBN1):c.5504G>A (p.Cys1835Tyr)

### NM_000138.4(FBN1):c.5863C>T (p.Gln1955Ter)

### NM_000138.4(FBN1):c.6658C>T (p.Arg2220Ter)

### NM_000138.4(FBN1):c.7606G>A (p.Gly2536Arg)

### NM_000138.4(FBN1):c.7955G>A (p.Cys2652Tyr)

### NM_000138.4(FBN1):c.3037G>A (p.Gly1013Arg)

### NM_000138.4(FBN1):c.8080C>T (p.Arg2694Ter)

### NM_000138.4(FBN1):c.1633C>T (p.Arg545Cys)

### NM_000138.4(FBN1):c.7205-1G>A

### NM_000138.4(FBN1):c.4621C>T (p.Arg1541Ter)

### NM_000138.4(FBN1):c.1090C>T (p.Arg364Ter)

### NM_000138.4(FBN1):c.1585C>T (p.Arg529Ter)

### NM_000138.4(FBN1):c.4781G>A (p.Gly1594Asp)

### NM_000138.4(FBN1):c.643C>T (p.Arg215Ter)

### NM_000138.4(FBN1):c.3668G>A (p.Cys1223Tyr)

### NM_000138.4(FBN1):c.8326C>T (p.Arg2776Ter)

### NM_000138.4(FBN1):c.6354C>T (p.Ile2118=)

### NM_000138.4(FBN1):c.1468+5G>A

### NM_000138.4(FBN1):c.1546C>T (p.Arg516Ter)

### NM_000138.4(FBN1):c.4615C>T (p.Arg1539Ter)

### NM_000138.4(FBN1):c.5368C>T (p.Arg1790Ter)

### NM_000138.4(FBN1):c.1285C>T (p.Arg429Ter)

[0831] See Table A. Accordingly, an aspect of the invention relates to a method for treating or preventing Marfan syndrome by correcting one or more pathogenic G-to-A or C-to-T mutations/SNPs, particularly one or more pathogenic G-to-A or C-to-T mutations/SNPs present in the FBN1 gene, and more particularly one or more pathogenic G-to-A or C-to-T mutations/SNPs described above.

### Hurler Syndrome

[0832] In some embodiments, the methods, systems, and compositions described herein are used to correct one or more pathogenic G-to-A or C-to-T mutations/SNPs associated with Hurler syndrome. In some embodiment, the pathogenic mutations/SNPs are present in at least the IDUA gene, including at least the followings:

### NM_000203.4(IDUA):c.972+1G>A

### NM_000203.4(IDUA):c.1855C>T (p.Arg619Ter)

### NM_000203.4(IDUA):c.152G>A (p.Gly51Asp)

### NM_000203.4(IDUA):c.1205G>A (p.Trp402Ter)

### NM_000203.4(IDUA):c.208C>T (p.Gln70Ter)

### NM_000203.4(IDUA):c.1045G>A (p.Asp349Asn)

### NM_000203.4(IDUA):c.1650+5G>A

[0833] See Table A. Accordingly, an aspect of the invention relates to a method for treating or preventing Hurler syndrome by correcting one or more pathogenic G-to-A or C-to-T mutations/SNPs, particularly one or more pathogenic G-to-A or C-to-T mutations/SNPs present in the IDUA gene, and more particularly one or more pathogenic G-to-A or C-to-T mutations/SNPs described above.

### Glycogen Storage Disease

[0834] In some embodiments, the methods, systems, and compositions described herein are used to correct one or more pathogenic G-to-A or C-to-T mutations/SNPs associated with Glycogen Storage Disease. In some embodiment, the pathogenic mutations/SNPs are present in at least one gene selected from GAA, AGL, PHKB, PRKAG2, G6PC, PGAM2, GBE1, PYGM, and PFKM, including at least the followings:

### NM_000152.4(GAA):c.1927G>A (p.Gly643Arg)

### NM_000152.4(GAA):c.2173C>T (p.Arg725Trp)

### NM_000642.2(AGL):c.3980G>A (p.Trp1327Ter)

### NM_000642.2(AGL):c.16C>T (p.Gln6Ter)

### NM_000642.2(AGL):c.2039G>A (p.Trp680Ter)

### NM_000293.2(PHKB):c.1546C>T (p.Gln516Ter)

### NM_016203.3(PRKAG2):c.1592G>A (p.Arg531Gln)

### NM_000151.3(G6PC):c.248G>A (p.Arg83His)

### NM_000151.3(G6PC):c.724C>T (p.Gln242Ter)

### NM_000151.3(G6PC):c.883C>T (p.Arg295Cys)

### NM_000151.3(G6PC):c.247C>T (p.Arg83Cys)

### NM_000151.3(G6PC):c.1039C>T (p.Gln347Ter)

### NM_000152.4(GAA):c.1561G>A (p.Glu521Lys)

### NM_000642.2(AGL):c.2590C>T (p.Arg864Ter)

### NM_000642.2(AGL):c.3682C>T (p.Arg1228Ter)

### NM_000642.2(AGL):c.118C>T (p.Gln40Ter)

### NM_000642.2(AGL):c.256C>T (p.Gln86Ter)

### NM_000642.2(AGL):c.2681+1G>A

### NM_000642.2(AGL):c.2158-1G>A

### NM_000290.3(PGAM2):c.233G>A (p.Trp78Ter)

### NM_000152.4(GAA):c.1548G>A (p.Trp516Ter)

### NM_000152.4(GAA):c.2014C>T (p.Arg672Trp)

### NM_000152.4(GAA):c.546G>A (p.Thr182=)

### NM_000152.4(GAA):c.1802C>T (p.Ser601Leu)

### NM_000152.4(GAA):c.1754+1G>A

### NM_000152.4(GAA):c.1082C>T (p.Pro361Leu)

### NM_000152.4(GAA):c.2560C>T (p.Arg854Ter)

### NM_000152.4(GAA):c.655G>A (p.Gly219Arg)

### NM_000152.4(GAA):c.1933G>A (p.Asp645Asn)

### NM_000152.4(GAA):c.1979G>A (p.Arg660His)

### NM_000152.4(GAA):c.1465G>A (p.Asp489Asn)

### NM_000152.4(GAA):c.2512C>T (p.Gln838Ter)

### NM_000158.3(GBE1):c.1543C>T (p.Arg515Cys)

### NM_005609.3(PYGM):c.1726C>T (p.Arg576Ter)

### NM_005609.3(PYGM):c.1827G>A (p.Lys609=)

### NM_005609.3(PYGM):c.148C>T (p.Arg50Ter)

### NM_005609.3(PYGM):c.613G>A (p.Gly205Ser)

### NM_005609.3(PYGM):c.1366G>A (p.Val456Met)

### NM_005609.3(PYGM):c.1768+1G>A

### NM_001166686.1(PFKM):c.450+1G>A

[0835] See Table A. Accordingly, an aspect of the invention relates to a method for treating or preventing Glycogen Storage Disease by correcting one or more pathogenic G-to-A or C-to-T mutations/SNPs, particularly one or more pathogenic G-to-A or C-to-T mutations/SNPs present in at least one gene selected from GAA, AGL, PHKB, PRKAG2, G6PC, PGAM2, GBE1, PYGM, and PFKM, and more particularly one or more pathogenic G-to-A or C-to-T mutations/SNPs described above.

### Cystic Fibrosis

[0836] In some embodiments, the methods, systems, and compositions described herein are used to correct one or more pathogenic G-to-A or C-to-T mutations/SNPs associated with Cystic Fibrosis. In some embodiment, the pathogenic mutations/SNPs are present in the CFTR gene, including at least the followings:

### NM_000492.3(CFTR):c.3712C>T (p.Gln1238Ter)

### NM_000492.3(CFTR):c.3484C>T (p.Arg1162Ter)

### NM_000492.3(CFTR):c.1766+1G>A

### NM_000492.3(CFTR):c.1477C>T (p.Gln493Ter)

### NM_000492.3(CFTR):c.2538G>A (p.Trp846Ter)

### NM_000492.3(CFTR):c.2551C>T (p.Arg851Ter)

### NM_000492.3(CFTR):c.3472C>T (p.Arg1158Ter)

### NM_000492.3(CFTR):c.1475C>T (p.Ser492Phe)

### NM_000492.3(CFTR):c.1679G>A (p.Arg560Lys)

### NM_000492.3(CFTR):c.3197G>A (p.Arg1066His)

### NM_000492.3(CFTR):c.3873+1G>A

### NM_000492.3(CFTR):c.3196C>T (p.Arg1066Cys)

### NM_000492.3(CFTR):c.2490+1G>A

### NM_000492.3(CFTR):c.3718-1G>A

### NM_000492.3(CFTR):c.171G>A (p.Trp57Ter)

### NM_000492.3(CFTR):c.3937C>T (p.Gln1313Ter)

### NM_000492.3(CFTR):c.274G>A (p.Glu92Lys)

### NM_000492.3(CFTR):c.1013C>T (p.Thr338Ile)

### NM_000492.3(CFTR):c.3266G>A (p.Trp1089Ter)

### NM_000492.3(CFTR):c.1055G>A (p.Arg352Gln)

### NM_000492.3(CFTR):c.1654C>T (p.Gln552Ter)

### NM_000492.3(CFTR):c.2668C>T (p.Gln890Ter)

### NM_000492.3(CFTR):c.3611G>A (p.Trp1204Ter)

### NM_000492.3(CFTR):c.1585-8G>A

### NM_000492.3(CFTR):c.223C>T (p.Arg75Ter)

### NM_000492.3(CFTR):c.1680-1G>A

### NM_000492.3(CFTR):c.349C>T (p.Arg117Cys)

### NM_000492.3(CFTR):c.1203G>A (p.Trp401Ter)

### NM_000492.3(CFTR):c.1240C>T (p.Gln414Ter)

### NM_000492.3(CFTR):c.1202G>A (p.Trp401Ter)

### NM_000492.3(CFTR):c.1209+1G>A

### NM_000492.3(CFTR):c.115C>T (p.Gln39Ter)

### NM_000492.3(CFTR):c.1116+1G>A

### NM_000492.3(CFTR):c.1393-1G>A

### NM_000492.3(CFTR):c.1573C>T (p.Gln525Ter)

### NM_000492.3(CFTR):c.164+1G>A

### NM_000492.3(CFTR):c.166G>A (p.Glu56Lys)

### NM_000492.3(CFTR):c.170G>A (p.Trp57Ter)

### NM_000492.3(CFTR):c.2053C>T (p.Gln685Ter)

### NM_000492.3(CFTR):c.2125C>T (p.Arg709Ter)

### NM_000492.3(CFTR):c.2290C>T (p.Arg764Ter)

### NM_000492.3(CFTR):c.2353C>T (p.Arg785Ter)

### NM_000492.3(CFTR):c.2374C>T (p.Arg792Ter)

### NM_000492.3(CFTR):c.2537G>A (p.Trp846Ter)

### NM_000492.3(CFTR):c.292C>T (p.Gln98Ter)

### NM_000492.3(CFTR):c.2989-1G>A

### NM_000492.3(CFTR):c.3293G>A (p.Trp1098Ter)

### NM_000492.3(CFTR):c.4144C>T (p.Gln1382Ter)

### NM_000492.3(CFTR):c.4231C>T (p.Gln1411Ter)

### NM_000492.3(CFTR):c.4234C>T (p.Gln1412Ter)

### NM_000492.3(CFTR):c.579+5G>A

### NM_000492.3(CFTR):c.595C>T (p.His199Tyr)

### NM_000492.3(CFTR):c.613C>T (p.Pro205Ser)

### NM_000492.3(CFTR):c.658C>T (p.Gln220Ter)

### NM_000492.3(CFTR):c.1117-1G>A

### NM_000492.3(CFTR):c.3294G>A (p.Trp1098Ter)

### NM_000492.3(CFTR):c.1865G>A (p.Gly622Asp)

### NM_000492.3(CFTR):c.743+1G>A

### NM_000492.3(CFTR):c.1679+1G>A

### NM_000492.3(CFTR):c.1657C>T (p.Arg553Ter)

### NM_000492.3(CFTR):c.1675G>A (p.Ala559Thr)

### NM_000492.3(CFTR):c.165-1G>A

### NM_000492.3(CFTR):c.200C>T (p.Pro67Leu)

### NM_000492.3(CFTR):c.2834C>T (p.Ser945Leu)

### NM_000492.3(CFTR):c.3846G>A (p.Trp1282Ter)

### NM_000492.3(CFTR):c.1652G>A (p.Gly551Asp)

### NM_000492.3(CFTR):c.4426C>T (p.Gln1476Ter)

### NM_000492.3: c. 3718-2477C>T

### NM_000492.3(CFTR):c.2988+1G>A

### NM_000492.3(CFTR):c.2657+5G>A

### NM_000492.3(CFTR):c.2988G>A (p.Gln996=)

### NM_000492.3(CFTR):c.274-1G>A

### NM_000492.3(CFTR):c.3612G>A (p.Trp1204Ter)

### NM_000492.3(CFTR):c.1646G>A (p.Ser549Asn)

### NM_000492.3(CFTR):c.3752G>A (p.Ser1251Asn)

### NM_000492.3(CFTR):c.4046G>A (p.Gly1349Asp)

### NM_000492.3(CFTR):c.532G>A (p.Gly178Arg)

[0837] NM_000492.3(CFTR):c.3731G>A (p. Gly1244Glu)

### NM_000492.3(CFTR):c.1651G>A (p.Gly551Ser)

### NM_000492.3(CFTR):c.1585-1G>A

### NM_000492.3(CFTR):c.1000C>T (p.Arg334Trp)

### NM_000492.3(CFTR):c.254G>A (p.Gly85Glu)

### NM_000492.3(CFTR):c.1040G>A (p.Arg347His)

### NM_000492.3(CFTR):c.273+1G>A

[0838] See Table A. Accordingly, an aspect of the invention relates to a method for treating or preventing Cystic Fibrosis by correcting one or more pathogenic G-to-A or C-to-T mutations/SNPs, particularly one or more pathogenic G-to-A or C-to-T mutations/SNPs present in the CFTR gene, and more particularly one or more pathogenic G-to-A or C-to-T mutations/SNPs described above.

### Examples of SNPs

[0839] In some embodiments, the methods, systems, and compositions described herein are used to correct a pathogenic A-to-G (A>G) mutation or SNP believed to be associated with familial 2 breast-ovarian cancer, wherein the pathogenic A>G mutation or SNP is located in the BRCA2 gene (HGVS: U43746.1:n.7829+1G>A). Accordingly, an additional aspect of the invention relates to a method for treating or preventing familial 2 breast-ovarian cancer by correcting the aforementioned pathogenic A>G mutation or SNP.

[0840] In some embodiments, the methods, systems, and compositions described herein are used to correct a pathogenic A-to-G (A>G) mutation or SNP believed to be associated with hereditary factor IX deficiency, wherein the pathogenic A>G mutation or SNP is located at GRCh38: ChrX: 139537145 in the F9 gene, which results in an Arg to Gln substitution. Accordingly, an additional aspect of the invention relates to a method for treating or preventing hereditary factor IX deficiency by correcting the aforementioned pathogenic A>G mutation or SNP.

[0841] In some embodiments, the methods, systems, and compositions described herein are used to correct a pathogenic A-to-G (A>G) mutation or SNP believed to be associated with beta-plus-thalassemia, beta thalassemia, and beta thalassemia major, wherein the pathogenic A>G mutation or SNP is located at GRCh38: Chr11: 5226820 in the HBB gene. Accordingly, an additional aspect of the invention relates to a method for treating or preventing with beta-plus-thalassemia, beta thalassemia, and beta thalassemia major by correcting the aforementioned pathogenic A>G mutation or SNP.

[0842] In some embodiments, the methods, systems, and compositions described herein are used to correct a pathogenic A-to-G (A>G) mutation or SNP believed to be associated with Marfan syndrome, wherein the pathogenic A>G mutation or SNP is located in the FBN1 gene (IVS2DS, G-A, +1), as reported by Yamamoto et al. J Hum Genet. 2000; 45(2):115-8. Accordingly, an additional aspect of the invention relates to a method for treating or preventing Marfan syndrome by correcting the aforementioned pathogenic A>G mutation or SNP.

[0843] In some embodiments, the methods, systems, and compositions described herein are used to correct a pathogenic A-to-G (A>G) mutation or SNP believed to be associated with Wiskott-Aldrich syndrome, wherein the pathogenic A>G mutation or SNP is located at position −1 of intro 6 of the WAS gene (IVS6AS, G-A, −1), as reported by Kwan et al. (1995). Accordingly, an additional aspect of the invention relates to a method for treating or preventing Wiskott-Aldrich syndrome by correcting the aforementioned pathogenic A>G mutation or SNP.

[0844] In some embodiments, the methods, systems, and compositions described herein are used to correct a pathogenic A-to-G (A>G) mutation or SNP believed to be associated with cystic fibrosis, wherein the pathogenic A>G mutation or SNP is located at GRCh38: Chr7:117590440 in the CFTR gene. Accordingly, an additional aspect of the invention relates to a method for treating or preventing cystic fibrosis by correcting the aforementioned pathogenic A>G mutation or SNP.

[0845] In some embodiments, the methods, systems, and compositions described herein are used to correct a pathogenic A-to-G (A>G) mutation or SNP believed to be associated with cystic fibrosis and hereditary pancreatitis, wherein the pathogenic A>G mutation or SNP is located GRCh38: Chr7:117606754 in the CFTR gene. Accordingly, an additional aspect of the invention relates to a method for treating or preventing cystic fibrosis and hereditary pancreatitis by correcting the aforementioned pathogenic A>G mutation or SNP.

[0846] In some embodiments, the methods, systems, and compositions described herein are used to correct a pathogenic A-to-G (A>G) mutation or SNP believed to be associated with cystic fibrosis, wherein the pathogenic A>G mutation or SNP is located at GRCh38: Chr7: 117587738 in the CFTR gene. Accordingly, an additional aspect of the invention relates to a method for treating or preventing cystic fibrosis by correcting the aforementioned pathogenic A>G mutation or SNP.

[0847] In some embodiments, the methods, systems, and compositions described herein are used to correct a pathogenic A-to-G (A>G) mutation or SNP believed to be associated with Turcot syndrome and Lynch syndrome, wherein the pathogenic A>G mutation or SNP is located at GRCh38: Chr2:47470964 in the MSH2 gene. Accordingly, an additional aspect of the invention relates to a method for treating or preventing Turcot syndrome and Lynch syndrome by correcting the aforementioned pathogenic A>G mutation or SNP.

[0848] In some embodiments, the methods, systems, and compositions described herein are used to correct a pathogenic A-to-G (A>G) mutation or SNP believed to be associated with cystic fibrosis, wherein the pathogenic A>G mutation or SNP is located at GRCh38: Chr7: 117642437 in the CFTR gene. Accordingly, an additional aspect of the invention relates to a method for treating or preventing cystic fibrosis by correcting the aforementioned pathogenic A>G mutation or SNP.

[0849] In some embodiments, the methods, systems, and compositions described herein are used to correct a pathogenic A-to-G (A>G) mutation or SNP believed to be associated with Lynch syndrome II and Lynch syndrome, wherein the pathogenic A>G mutation or SNP is located at GRCh38: Chr3:37001058 in the MLH1 gene. Accordingly, an additional aspect of the invention relates to a method for treating or preventing Lynch syndrome II and Lynch syndrome by correcting the aforementioned pathogenic A>G mutation or SNP.

[0850] In some embodiments, the methods, systems, and compositions described herein are used to correct a pathogenic A-to-G (A>G) mutation or SNP believed to be associated with cystic fibrosis, wherein the pathogenic A>G mutation or SNP is located at GRCh38: Chr7: 117642594 in the CFTR gene. Accordingly, an additional aspect of the invention relates to a method for treating or preventing cystic fibrosis by correcting the aforementioned pathogenic A>G mutation or SNP.

[0851] In some embodiments, the methods, systems, and compositions described herein are used to correct a pathogenic A-to-G (A>G) mutation or SNP believed to be associated with cystic fibrosis, wherein the pathogenic A>G mutation or SNP is located at GRCh38: Chr7: 117592658 in the CFTR gene. Accordingly, an additional aspect of the invention relates to a method for treating or preventing cystic fibrosis by correcting the aforementioned pathogenic A>G mutation or SNP.

[0852] In some embodiments, the methods, systems, and compositions described herein are used to correct a pathogenic A-to-G (A>G) mutation or SNP believed to be associated with familial 1 breast-ovarian cancer, hereditary breast and ovarian cancer syndrome, and hereditary cancer-predisposing syndrome, wherein the pathogenic A>G mutation or SNP is located at GRCh38: Chr17:43057051 in the BRCA1 gene. Accordingly, an additional aspect of the invention relates to a method for treating or preventing familial 1 breast-ovarian cancer, hereditary breast and ovarian cancer syndrome, and hereditary cancer-predisposing syndrome by correcting the aforementioned pathogenic A>G mutation or SNP.

[0853] In some embodiments, the methods, systems, and compositions described herein are used to correct a pathogenic A-to-G (A>G) mutation or SNP believed to be associated with dihydropyrimidine dehydrogenase deficiency, Hirschsprung disease 1, fluorouracil response, pyrimidine analogues response—toxicity/ADR, capecitabine response—toxicity/ADR, fluorouracil response—toxicity/ADR, tegafur response—toxicity/ADR, wherein the pathogenic A>G mutation or SNP is located at GRCh38: Chr1:97450058 in the DPYD gene. Accordingly, an additional aspect of the invention relates to a method for treating or preventing dihydropyrimidine dehydrogenase deficiency, Hirschsprung disease 1, fluorouracil response, pyrimidine analogues response—toxicity/ADR, capecitabine response—toxicity/ADR, fluorouracil response—toxicity/ADR, tegafur response—toxicity/ADR by correcting the aforementioned pathogenic A>G mutation or SNP.

[0854] In some embodiments, the methods, systems, and compositions described herein are used to correct a pathogenic A-to-G (A>G) mutation or SNP believed to be associated with Lynch syndrome, wherein the pathogenic A>G mutation or SNP is located at GRCh38: Chr2:47478520 in the MSH2 gene. Accordingly, an additional aspect of the invention relates to a method for treating or preventing the Lynch syndrome by correcting the aforementioned pathogenic A>G mutation or SNP.

[0855] In some embodiments, the methods, systems, and compositions described herein are used to correct a pathogenic A-to-G (A>G) mutation or SNP believed to be associated with Lynch syndrome, wherein the pathogenic A>G mutation or SNP is located at GRCh38: Chr3:37011819 in the MLH1 gene. Accordingly, an additional aspect of the invention relates to a method for treating or preventing the Lynch syndrome by correcting the aforementioned pathogenic A>G mutation or SNP.

[0856] In some embodiments, the methods, systems, and compositions described herein are used to correct a pathogenic A-to-G (A>G) mutation or SNP believed to be associated with Lynch syndrome, wherein the pathogenic A>G mutation or SNP is located at GRCh38: Chr3: 37014545 in the MLH1 gene. Accordingly, an additional aspect of the invention relates to a method for treating or preventing the Lynch syndrome by correcting the aforementioned pathogenic A>G mutation or SNP.

[0857] In some embodiments, the methods, systems, and compositions described herein are used to correct a pathogenic A-to-G (A>G) mutation or SNP believed to be associated with Lynch syndrome, wherein the pathogenic A>G mutation or SNP is located at GRCh38: Chr3: 37011867 in the MLH1 gene. Accordingly, an additional aspect of the invention relates to a method for treating or preventing the Lynch syndrome by correcting the aforementioned pathogenic A>G mutation or SNP.

[0858] In some embodiments, the methods, systems, and compositions described herein are used to correct a pathogenic A-to-G (A>G) mutation or SNP believed to be associated with Lynch syndrome, wherein the pathogenic A>G mutation or SNP is located at GRCh38: Chr3: 37025636 in the MLH1 gene. Accordingly, an additional aspect of the invention relates to a method for treating or preventing the Lynch syndrome by correcting the aforementioned pathogenic A>G mutation or SNP.

[0859] In some embodiments, the methods, systems, and compositions described herein are used to correct a pathogenic A-to-G (A>G) mutation or SNP believed to be associated with Lynch syndrome, wherein the pathogenic A>G mutation or SNP is located at GRCh38: Chr3: 37004475 in the MLH1 gene. Accordingly, an additional aspect of the invention relates to a method for treating or preventing the Lynch syndrome by correcting the aforementioned pathogenic A>G mutation or SNP.

[0860] In some embodiments, the methods, systems, and compositions described herein are used to correct a pathogenic A-to-G (A>G) mutation or SNP believed to be associated with Lynch syndrome and hereditary cancer-predisposing syndrome, wherein the pathogenic A>G mutation or SNP is located at GRCh38: Chr2:47416430 in the MSH2 gene. Accordingly, an additional aspect of the invention relates to a method for treating or preventing Lynch syndrome and hereditary cancer-predisposing syndrome by correcting the aforementioned pathogenic A>G mutation or SNP.

[0861] In some embodiments, the methods, systems, and compositions described herein are used to correct a pathogenic A-to-G (A>G) mutation or SNP believed to be associated with Lynch syndrome and hereditary cancer-predisposing syndrome, wherein the pathogenic A>G mutation or SNP is located at GRCh38: Chr2: 47408400 in the MSH2 gene. Accordingly, an additional aspect of the invention relates to a method for treating or preventing Lynch syndrome and hereditary cancer-predisposing syndrome by correcting the aforementioned pathogenic A>G mutation or SNP.

[0862] In some embodiments, the methods, systems, and compositions described herein are used to correct a pathogenic A-to-G (A>G) mutation or SNP believed to be associated with Lynch syndrome and hereditary cancer-predisposing syndrome, wherein the pathogenic A>G mutation or SNP is located at GRCh38: Chr3:36996710 in the MLH1 gene. Accordingly, an additional aspect of the invention relates to a method for treating or preventing Lynch syndrome and hereditary cancer-predisposing syndrome by correcting the aforementioned pathogenic A>G mutation or SNP.

[0863] In some embodiments, the methods, systems, and compositions described herein are used to correct a pathogenic A-to-G (A>G) mutation or SNP believed to be associated with familial 1 breast-ovarian cancer, wherein the pathogenic A>G mutation or SNP is located at GRCh38: Chr17:43067696 in the BRCA1 gene. Accordingly, an additional aspect of the invention relates to a method for treating or preventing familial 1 breast-ovarian cancer by correcting the aforementioned pathogenic A>G mutation or SNP.

[0864] In some embodiments, the methods, systems, and compositions described herein are used to correct a pathogenic A-to-G (A>G) mutation or SNP believed to be associated with familial 2 breast-ovarian cancer and hereditary breast and ovarian cancer syndrome, wherein the pathogenic A>G mutation or SNP is located at GRCh38: Chr13:32356610 in the BRCA2 gene. Accordingly, an additional aspect of the invention relates to a method for treating or preventing familial 2 breast-ovarian cancer and hereditary breast and ovarian cancer syndrome by correcting the aforementioned pathogenic A>G mutation or SNP.

[0865] In some embodiments, the methods, systems, and compositions described herein are used to correct a pathogenic A-to-G (A>G) mutation or SNP believed to be associated with primary dilated cardiomyopathy and primary familial hypertrophic cardiomyopathy, wherein the pathogenic A>G mutation or SNP is located at GRCh38: Chr14:23419993 in the MYH7 gene. Accordingly, an additional aspect of the invention relates to a method for treating or preventing primary dilated cardiomyopathy and primary familial hypertrophic cardiomyopathy by correcting the aforementioned pathogenic A>G mutation or SNP.

[0866] In some embodiments, the methods, systems, and compositions described herein are used to correct a pathogenic A-to-G (A>G) mutation or SNP believed to be associated with primary familial hypertrophic cardiomyopathy, camptocormism, and hypertrophic cardiomyopathy, wherein the pathogenic A>G mutation or SNP is located at GRCh38: Chr14:23415225 in the MYH7 gene. Accordingly, an additional aspect of the invention relates to a method for treating or preventing primary familial hypertrophic cardiomyopathy, camptocormism, and hypertrophic cardiomyopathy by correcting the aforementioned pathogenic A>G mutation or SNP.

[0867] In some embodiments, the methods, systems, and compositions described herein are used to correct a pathogenic A-to-G (A>G) mutation or SNP believed to be associated with familial cancer of breast, familial 2 breast-ovarian cancer, hereditary breast and ovarian cancer syndrome, and hereditary cancer-predisposing syndrome, wherein the pathogenic A>G mutation or SNP is located at GRCh38: Chr13:32357741 in the BRCA2 gene. Accordingly, an additional aspect of the invention relates to a method for treating or preventing the familial cancer of breast, familial 2 breast-ovarian cancer, hereditary breast and ovarian cancer syndrome, and hereditary cancer-predisposing syndrome by correcting the aforementioned pathogenic A>G mutation or SNP.

[0868] In some embodiments, the methods, systems, and compositions described herein are used to correct a pathogenic A-to-G (A>G) mutation or SNP believed to be associated with primary dilated cardiomyopathy, hypertrophic cardiomyopathy, cardiomyopathy, and left ventricular noncompaction, wherein the pathogenic A>G mutation or SNP is located at GRCh38: Chr14:23431584 in the MYH7 gene. Accordingly, an additional aspect of the invention relates to a method for treating or preventing primary dilated cardiomyopathy, hypertrophic cardiomyopathy, cardiomyopathy, and left ventricular noncompaction by correcting the aforementioned pathogenic A>G mutation or SNP.

[0869] In some embodiments, the methods, systems, and compositions described herein are used to correct a pathogenic A-to-G (A>G) mutation or SNP believed to be associated with familial 1 breast-ovarian cancer, hereditary breast and ovarian cancer syndrome, and hereditary cancer-predisposing syndrome, wherein the pathogenic A>G mutation or SNP is located at GRCh38: Chr17:43067607 in the BRCA1 gene. Accordingly, an additional aspect of the invention relates to a method for treating or preventing familial 1 breast-ovarian cancer, hereditary breast and ovarian cancer syndrome, and hereditary cancer-predisposing syndrome by correcting the aforementioned pathogenic A>G mutation or SNP.

[0870] In some embodiments, the methods, systems, and compositions described herein are used to correct a pathogenic A-to-G (A>G) mutation or SNP believed to be associated with familial 1 breast-ovarian cancer, hereditary breast and ovarian cancer syndrome, hereditary cancer-predisposing syndrome, and breast cancer, wherein the pathogenic A>G mutation or SNP is located at GRCh38: Chr17:43047666 in the BRCA1 gene. Accordingly, an additional aspect of the invention relates to a method for treating or preventing familial 1 breast-ovarian cancer, hereditary breast and ovarian cancer syndrome, hereditary cancer-predisposing syndrome, and breast cancer by correcting the aforementioned pathogenic A>G mutation or SNP.

[0871] In some embodiments, the methods, systems, and compositions described herein are used to correct a pathogenic A-to-G (A>G) mutation or SNP believed to be associated with familial 2 breast-ovarian cancer, hereditary breast and ovarian cancer syndrome, and hereditary cancer-predisposing syndrome, wherein the pathogenic A>G mutation or SNP is located at GRCh38: Chr13:32370558 in the BRCA2 gene. Accordingly, an additional aspect of the invention relates to a method for treating or preventing familial 2 breast-ovarian cancer, hereditary breast and ovarian cancer syndrome, and hereditary cancer-predisposing syndrome by correcting the aforementioned pathogenic A>G mutation or SNP.

[0872] In some embodiments, the methods, systems, and compositions described herein are used to correct a pathogenic A-to-G (A>G) mutation or SNP believed to be associated with familial 1 breast-ovarian cancer, hereditary breast and ovarian cancer syndrome, hereditary cancer-predisposing syndrome, and breast cancer, wherein the pathogenic A>G mutation or SNP is located at GRCh38: Chr17:43074330 in the BRCA1 gene. Accordingly, an additional aspect of the invention relates to a method for treating or preventing familial 1 breast-ovarian cancer, hereditary breast and ovarian cancer syndrome, hereditary cancer-predisposing syndrome, and breast cancer by correcting the aforementioned pathogenic A>G mutation or SNP.

[0873] In some embodiments, the methods, systems, and compositions described herein are used to correct a pathogenic A-to-G (A>G) mutation or SNP believed to be associated with familial 1 breast-ovarian cancer, hereditary breast and ovarian cancer syndrome, and hereditary cancer-predisposing syndrome, wherein the pathogenic A>G mutation or SNP is located at GRCh38: Chr17: 43082403 in the BRCA1 gene. Accordingly, an additional aspect of the invention relates to a method for treating or preventing familial 1 breast-ovarian cancer, hereditary breast and ovarian cancer syndrome, and hereditary cancer-predisposing syndrome by correcting the aforementioned pathogenic A>G mutation or SNP.

[0874] In some embodiments, the methods, systems, and compositions described herein are used to correct a pathogenic C-to-T (C>T) mutation or SNP believed to be associated with cystic fibrosis and hereditary pancreatitis, wherein the pathogenic C>T mutation or SNP is located at GRCh38: Chr7:117639961 in the CFTR gene. Accordingly, an additional aspect of the invention relates to a method for treating or preventing the cystic fibrosis and hereditary pancreatitis by correcting the aforementioned pathogenic C>T mutation or SNP.

[0875] In some embodiments, the methods, systems, and compositions described herein are used to correct a pathogenic C-to-T (C>T) mutation or SNP believed to be associated with familial 2 breast-ovarian cancer, wherein the pathogenic C>T mutation or SNP is located at GRCh38: Chr13:32336492 in the BRCA2 gene. Accordingly, an additional aspect of the invention relates to a method for treating or preventing the familial 2 breast-ovarian cancer by correcting the aforementioned pathogenic C>T mutation or SNP.

[0876] In some embodiments, the methods, systems, and compositions described herein are used to correct a pathogenic C-to-T (C>T) mutation or SNP believed to be associated with familial 1 breast-ovarian cancer, wherein the pathogenic C>T mutation or SNP is located at GRCh38: Chr17:43063365 in the BRCA1 gene. Accordingly, an additional aspect of the invention relates to a method for treating or preventing the familial 1 breast-ovarian cancer by correcting the aforementioned pathogenic C>T mutation or SNP.

[0877] In some embodiments, the methods, systems, and compositions described herein are used to correct a pathogenic C-to-T (C>T) mutation or SNP believed to be associated with familial 1 breast-ovarian cancer, wherein the pathogenic C>T mutation or SNP is located at GRCh38: Chr17:43093613 in the BRCA1 gene. Accordingly, an additional aspect of the invention relates to a method for treating or preventing the familial 1 breast-ovarian cancer by correcting the aforementioned pathogenic C>T mutation or SNP.

[0878] In some embodiments, the methods, systems, and compositions described herein are used to correct a pathogenic C-to-T (C>T) mutation or SNP believed to be associated with familial cancer of breast, and familial 1 breast-ovarian cancer, wherein the pathogenic C>T mutation or SNP is located at at GRCh38: Chr17:43093931 of the BRCA1 gene. Accordingly, an additional aspect of the invention relates to a method for treating or preventing familial cancer of breast, and familial 1 breast-ovarian cancer by correcting the aforementioned pathogenic C>T mutation or SNP.

[0879] In some embodiments, the methods, systems, and compositions described herein are used to correct a pathogenic C-to-T (C>T) mutation or SNP believed to be associated with familial hypertrophic cardiomyopathy 1, primary familial hypertrophic cardiomyopathy, and hypertrophic cardiomyopathy, wherein the pathogenic C>T mutation or SNP is located at GRCh38: Chr14:23429279 of the MYH7 gene. Accordingly, an additional aspect of the invention relates to a method for treating or preventing familial hypertrophic cardiomyopathy 1, primary familial hypertrophic cardiomyopathy, and hypertrophic cardiomyopathy by correcting the aforementioned pathogenic C>T mutation or SNP.

[0880] In some embodiments, the methods, systems, and compositions described herein are used to correct a pathogenic C-to-T (C>T) mutation or SNP believed to be associated with familial 2 breast-ovarian cancer, hereditary breast and ovarian cancer syndrome, and hereditary cancer-predisposing syndrome, wherein the pathogenic C>T mutation or SNP is located at GRCh38: Chr13:32356472 of the BRCA2 gene. Accordingly, an additional aspect of the invention relates to a method for treating or preventing familial 2 breast-ovarian cancer, hereditary breast and ovarian cancer syndrome, and hereditary cancer-predisposing syndrome by correcting the aforementioned pathogenic C>T mutation or SNP.

[0881] In some embodiments, the methods, systems, and compositions described herein are used to correct a pathogenic C-to-T (C>T) mutation or SNP believed to be associated with familial hypertrophic cardiomyopathy 1, primary familial hypertrophic cardiomyopathy, familial restrictive cardiomyopathy, and hypertrophic cardiomyopathy, wherein the pathogenic C>T mutation or SNP is located at GRCh38: Chr14:23429005 in the MYH7 gene. Accordingly, an additional aspect of the invention relates to a method for treating or preventing familial hypertrophic cardiomyopathy 1, primary familial hypertrophic cardiomyopathy, familial restrictive cardiomyopathy, and hypertrophic cardiomyopathy by correcting the aforementioned pathogenic C>T mutation or SNP.

[0882] Additional pathogenic A>G mutations and SNPs are found in the ClinVar database Accordingly, an additional aspect of the present disclosure relates to correction of a pathogenic A>G mutation or SNP listed in ClinVar using the methods, systems, and compositions described herein to treat or prevent a disease or condition associated therewith.

[0883] Additional pathogenic C>T mutations and SNPs are also found in the ClinVar database. Accordingly, an additional aspect of the present disclosure relates to correction of a pathogenic C>T mutation or SNP listed in ClinVar using the methods, systems, and compositions described herein to treat or prevent a disease or condition associated therewith. Other T mutations or SNPS that may be addressed using the embodiments disclosed herein are listed in a table found in the ASCII text filed entitled “Clin varpathogenic SNPS TC txt” filed herewith.

### Application in Non-Animal Organisms

[0884] The AD-functionalized CRISPR system(s) (e.g., single or multiplexed) can be used in conjunction with recent advances in crop genomics. The systems described herein can be used to perform efficient and cost effective plant gene or genome interrogation or editing or manipulation—for instance, for rapid investigation and/or selection and/or interrogations and/or comparison and/or manipulations and/or transformation of plant genes or genomes; e.g., to create, identify, develop, optimize, or confer trait(s) or characteristic(s) to plant(s) or to transform a plant genome. There can accordingly be improved production of plants, new plants with new combinations of traits or characteristics or new plants with enhanced traits. The AD-functionalized CRISPR system can be used with regard to plants in Site-Directed Integration (SDI) or Gene Editing (GE) or any Near Reverse Breeding (NRB) or Reverse Breeding (RB) techniques. Aspects of utilizing the herein described Cas13 effector protein systems may be analogous to the use of the CRISPR-Cas (e.g. CRISPR-Cas9) system in plants, and mention is made of the University of Arizona web site “CRISPR-PLANT” (http://www.genome.arizona.edu/crispr/) (supported by Penn State and AGI). Embodiments of the invention can be used in genome editing in plants or where RNAi or similar genome editing techniques have been used previously; see, e.g., Nekrasov, “Plant genome editing made easy: targeted mutagenesis in model and crop plants using the CRISPR-Cas system,” Plant Methods 2013, 9:39 (doi:10.1186/1746-4811-9-39); Brooks, “Efficient gene editing in tomato in the first generation using the CRISPR-Cas9 system,” Plant Physiology September 2014 pp 114.247577; Shan, “Targeted genome modification of crop plants using a CRISPR-Cas system,” Nature Biotechnology 31, 686-688 (2013); Feng, “Efficient genome editing in plants using a CRISPR-Cas system,” Cell Research (2013) 23:1229-1232. doi:10.1038/cr.2013.114; published online 20 Aug. 2013; Xie, “RNA-guided genome editing in plants using a CRISPR-Cas system,” Mol Plant. 2013 November; 6(6):1975-83. doi: 10.1093/mp/sst119. Epub 2013 Aug. 17; Xu, “Gene targeting using the Agrobacterium tumefaciens-mediated CRISPR-Cas system in rice,” Rice 2014, 7:5 (2014), Zhou et al., “Exploiting SNPs for biallelic CRISPR mutations in the outcrossing woody perennial Populus reveals 4-coumarate: CoA ligase specificity and Redundancy,” New Phytologist (2015) (Forum) 1-4 (available online only at www.newphytologist.com); Caliando et al, “Targeted DNA degradation using a CRISPR device stably carried in the host genome, NATURE COMMUNICATIONS 6:6989, DOI: 10.1038/ncomms7989, www.nature.com/naturecommunications DOI: 10.1038/ncomms7989; U.S. Pat. No. 6,603,061—Agrobacterium-Mediated Plant Transformation Method; U.S. Pat. No. 7,868,149—Plant Genome Sequences and Uses Thereof and US 2009/0100536—Transgenic Plants with Enhanced Agronomic Traits, all the contents and disclosure of each of which are herein incorporated by reference in their entirety. In the practice of the invention, the contents and disclosure of Morrell et al “Crop genomics: advances and applications,” Nat Rev Genet. 2011 Dec. 29; 13(2):85-96; each of which is incorporated by reference herein including as to how herein embodiments may be used as to plants. Accordingly, reference herein to animal cells may also apply, mutatis mutandis, to plant cells unless otherwise apparent; and, the enzymes herein having reduced off-target effects and systems employing such enzymes can be used in plant applications, including those mentioned herein.

### Application of AD-Functionalized CRISPR System to Plants and Yeast

[0885] In general, the term “plant” relates to any various photosynthetic, eukaryotic, unicellular or multicellular organism of the kingdom Plantae characteristically growing by cell division, containing chloroplasts, and having cell walls comprised of cellulose. The term plant encompasses monocotyledonous and dicotyledonous plants. Specifically, the plants are intended to comprise without limitation angiosperm and gymnosperm plants such as acacia, alfalfa, amaranth, apple, apricot, artichoke, ash tree, asparagus, avocado, banana, barley, beans, beet, birch, beech, blackberry, blueberry, broccoli, Brussel's sprouts, cabbage, canola, cantaloupe, carrot, cassava, cauliflower, cedar, a cereal, celery, chestnut, cherry, Chinese cabbage, citrus, clementine, clover, coffee, corn, cotton, cowpea, cucumber, cypress, eggplant, elm, endive, eucalyptus, fennel, figs, fir, geranium, grape, grapefruit, groundnuts, ground cherry, gum hemlock, hickory, kale, kiwifruit, kohlrabi, larch, lettuce, leek, lemon, lime, locust, pine, maidenhair, maize, mango, maple, melon, millet, mushroom, mustard, nuts, oak, oats, oil palm, okra, onion, orange, an ornamental plant or flower or tree, papaya, palm, parsley, parsnip, pea, peach, peanut, pear, peat, pepper, persimmon, pigeon pea, pine, pineapple, plantain, plum, pomegranate, potato, pumpkin, radicchio, radish, rapeseed, raspberry, rice, rye, sorghum, safflower, sallow, soybean, spinach, spruce, squash, strawberry, sugar beet, sugarcane, sunflower, sweet potato, sweet corn, tangerine, tea, tobacco, tomato, trees, triticale, turf grasses, turnips, vine, walnut, watercress, watermelon, wheat, yams, yew, and zucchini. The term plant also encompasses Algae, which are mainly photoautotrophs unified primarily by their lack of roots, leaves and other organs that characterize higher plants.

[0886] The methods for genome editing using the AD-functionalized CRISPR system as described herein can be used to confer desired traits on essentially any plant. A wide variety of plants and plant cell systems may be engineered for the desired physiological and agronomic characteristics described herein using the nucleic acid constructs of the present disclosure and the various transformation methods mentioned above. In preferred embodiments, target plants and plant cells for engineering include, but are not limited to, those monocotyledonous and dicotyledonous plants, such as crops including grain crops (e.g., wheat, maize, rice, millet, barley), fruit crops (e.g., tomato, apple, pear, strawberry, orange), forage crops (e.g., alfalfa), root vegetable crops (e.g., carrot, potato, sugar beets, yam), leafy vegetable crops (e.g., lettuce, spinach); flowering plants (e.g., petunia, rose, chrysanthemum), conifers and pine trees (e.g., pine fir, spruce); plants used in phytoremediation (e.g., heavy metal accumulating plants); oil crops (e.g., sunflower, rape seed) and plants used for experimental purposes (e.g., Arabidopsis). Thus, the methods and systems can be used over a broad range of plants, such as for example with dicotyledonous plants belonging to the orders Magniolales, Illiciales, Laurales, Piperales, Aristochiales, Nymphaeales, Ranunculales, Papeverales, Sarraceniaceae, Trochodendrales, Hamamelidales, Eucomiales, Leitneriales, Myricales, Fagales, Casuarinales, Caryophyllales, Batales, Polygonales, Plumbaginales, Dilleniales, Theales, Malvales, Urticales, Lecythidales, Violales, Salicales, Capparales, Ericales, Diapensales, Ebenales, Primulales, Rosales, Fabales, Podostemales, Haloragales, Myrtales, Cornales, Proteales, San tales, Rafflesiales, Celastrales, Euphorbiales, Rhamnales, Sapindales, Juglandales, Geraniales, Polygalales, Umbellales, Gentianales, Polemoniales, Lamiales, Plantaginales, Scrophulariales, Campanulales, Rubiales, Dipsacales, and Asterales; the methods and CRISPR-Cas systems can be used with monocotyledonous plants such as those belonging to the orders Alismatales, Hydrocharitales, Najadales, Triuridales, Commelinales, Eriocaulales, Restionales, Poales, Juncales, Cyperales, Typhales, Bromeliales, Zingiberales, Arecales, Cyclanthales, Pandanales, Arales, Lilliales, and Orchid ales, or with plants belonging to Gymnospermae, e.g those belonging to the orders Pinales, Ginkgoales, Cycadales, Araucariales, Cupressales and Gnetales.

[0887] The AD-functionalized CRISPR systems and methods of use described herein can be used over a broad range of plant species, included in the non-limitative list of dicot, monocot or gymnosperm genera hereunder: Atropa, Alseodaphne, Anacardium, Arachis, Beilschmiedia, Brassica, Carthamus, Cocculus, Croton, Cucumis, Citrus, Citrullus, Capsicum, Catharanthus, Cocos, Coffea, Cucurbita, Daucus, Duguetia, Eschscholzia, Ficus, Fragaria, Glaucium, Glycine, Gossypium, Helianthus, Hevea, Hyoscyamus, Lactuca, Landolphia, Linum, Litsea, Lycopersicon, Lupinus, Manihot, Majorana, Malus, Medicago, Nicotiana, Olea, Parthenium, Papaver, Persea, Phaseolus, Pistacia, Pisum, Pyrus, Prunus, Raphanus, Ricinus, Senecio, Sinomenium, Stephania, Sinapis, Solanum, Theobroma, Trifolium, Trigonella, Vicia, Vinca, Vilis, and Vigna; and the genera Allium, Andropogon, Aragrostis, Asparagus, Avena, Cynodon, Elaeis, Festuca, Festulolium, Heterocallis, Hordeum, Lemna, Lolium, Musa, Oryza, Panicum, Pannesetum, Phleum, Poa, Secale, Sorghum, Triticum, Zea, Abies, Cunninghamia, Ephedra, Picea, Pinus, and Pseudotsuga.

[0888] The AD-functionalized CRISPR systems and methods of use can also be used over a broad range of “algae” or “algae cells”; including for example algea selected from several eukaryotic phyla, including the Rhodophyta (red algae), Chlorophyta (green algae), Phaeophyta (brown algae), Bacillariophyta (diatoms), Eustigmatophyta and dinoflagellates as well as the prokaryotic phylum Cyanobacteria (blue-green algae). The term “algae” includes for example algae selected from: Amphora, Anabaena, Anikstrodesmis, Botryococcus, Chaetoceros, Chlamydomonas, Chlorella, Chlorococcum, Cyclotella, Cylindrotheca, Dunaliella, Emiliana, Euglena, Hematococcus, Isochrysis, Monochrysis, Monoraphidium, Nannochloris, Nannnochloropsis, Navicula, Nephrochloris, Nephroselmis, Nitzschia, Nodularia, Nostoc, Oochromonas, Oocystis, Oscillartoria, Pavlova, Phaeodactylum, Playtmonas, Pleurochrysis, Porhyra, Pseudoanabaena, Pyramimonas, Stichococcus, Synechococcus, Synechocystis, Tetraselmis, Thalassiosira, and Trichodesmium.

[0889] A part of a plant, i.e., a “plant tissue” may be treated according to the methods of the present invention to produce an improved plant. Plant tissue also encompasses plant cells. The term “plant cell” as used herein refers to individual units of a living plant, either in an intact whole plant or in an isolated form grown in in vitro tissue cultures, on media or agar, in suspension in a growth media or buffer or as a part of higher organized unites, such as, for example, plant tissue, a plant organ, or a whole plant.

[0890] A “protoplast” refers to a plant cell that has had its protective cell wall completely or partially removed using, for example, mechanical or enzymatic means resulting in an intact biochemical competent unit of living plant that can reform their cell wall, proliferate and regenerate grow into a whole plant under proper growing conditions.

[0891] The term “transformation” broadly refers to the process by which a plant host is genetically modified by the introduction of DNA by means of Agrobacteria or one of a variety of chemical or physical methods. As used herein, the term “plant host” refers to plants, including any cells, tissues, organs, or progeny of the plants. Many suitable plant tissues or plant cells can be transformed and include, but are not limited to, protoplasts, somatic embryos, pollen, leaves, seedlings, stems, calli, stolons, microtubers, and shoots. A plant tissue also refers to any clone of such a plant, seed, progeny, propagule whether generated sexually or asexually, and descendents of any of these, such as cuttings or seed.

[0892] The term “transformed” as used herein, refers to a cell, tissue, organ, or organism into which a foreign DNA molecule, such as a construct, has been introduced. The introduced DNA molecule may be integrated into the genomic DNA of the recipient cell, tissue, organ, or organism such that the introduced DNA molecule is transmitted to the subsequent progeny. In these embodiments, the “transformed” or “transgenic” cell or plant may also include progeny of the cell or plant and progeny produced from a breeding program employing such a transformed plant as a parent in a cross and exhibiting an altered phenotype resulting from the presence of the introduced DNA molecule. Preferably, the transgenic plant is fertile and capable of transmitting the introduced DNA to progeny through sexual reproduction.

[0893] The term “progeny”, such as the progeny of a transgenic plant, is one that is born of, begotten by, or derived from a plant or the transgenic plant. The introduced DNA molecule may also be transiently introduced into the recipient cell such that the introduced DNA molecule is not inherited by subsequent progeny and thus not considered “transgenic”. Accordingly, as used herein, a “non-transgenic” plant or plant cell is a plant which does not contain a foreign DNA stably integrated into its genome.

[0894] The term “plant promoter” as used herein is a promoter capable of initiating transcription in plant cells, whether or not its origin is a plant cell. Exemplary suitable plant promoters include, but are not limited to, those that are obtained from plants, plant viruses, and bacteria such as Agrobacterium or Rhizobium which comprise genes expressed in plant cells.

[0895] As used herein, a “fungal cell” refers to any type of eukaryotic cell within the kingdom of fungi. Phyla within the kingdom of fungi include Ascomycota, Basidiomycota, Blastocladiomycota, Chytridiomycota, Glomeromycota, Microsporidia, and Neocallimastigomycota. Fungal cells may include yeasts, molds, and filamentous fungi. In some embodiments, the fungal cell is a yeast cell.

[0896] As used herein, the term “yeast cell” refers to any fungal cell within the phyla Ascomycota and Basidiomycota. Yeast cells may include budding yeast cells, fission yeast cells, and mold cells. Without being limited to these organisms, many types of yeast used in laboratory and industrial settings are part of the phylum Ascomycota. In some embodiments, the yeast cell is an S. cerervisiae, Kluyveromyces marxianus, or Issatchenkia orientalis cell. Other yeast cells may include without limitation Candida spp. (e.g., Candida albicans), Yarrowia spp. (e.g., Yarrowia lipolytica), Pichia spp. (e.g., Pichia pastoris), Kluyveromyces spp. (e.g., Kluyveromyces lactis and Kluyveromyces marxianus), Neurospora spp. (e.g., Neurospora crassa), Fusarium spp. (e.g., Fusarium oxysporum), and Issatchenkia spp. (e.g., Issatchenkia orientalis, a.k.a. Pichia kudriavzevii and Candida acidothermophilum). In some embodiments, the fungal cell is a filamentous fungal cell. As used herein, the term “filamentous fungal cell” refers to any type of fungal cell that grows in filaments, i.e., hyphae or mycelia. Examples of filamentous fungal cells may include without limitation Aspergillus spp. (e.g., Aspergillus niger), Trichoderma spp. (e.g., Trichoderma reesei), Rhizopus spp. (e.g., Rhizopus oryzae), and Mortierella spp. (e.g., Mortierella isabellina).

[0897] In some embodiments, the fungal cell is an industrial strain. As used herein, “industrial strain” refers to any strain of fungal cell used in or isolated from an industrial process, e.g., production of a product on a commercial or industrial scale. Industrial strain may refer to a fungal species that is typically used in an industrial process, or it may refer to an isolate of a fungal species that may be also used for non-industrial purposes (e.g., laboratory research). Examples of industrial processes may include fermentation (e.g., in production of food or beverage products), distillation, biofuel production, production of a compound, and production of a polypeptide. Examples of industrial strains may include, without limitation, JAY270 and ATCC4124.

[0898] In some embodiments, the fungal cell is a polyploid cell. As used herein, a “polyploid” cell may refer to any cell whose genome is present in more than one copy. A polyploid cell may refer to a type of cell that is naturally found in a polyploid state, or it may refer to a cell that has been induced to exist in a polyploid state (e.g., through specific regulation, alteration, inactivation, activation, or modification of meiosis, cytokinesis, or DNA replication). A polyploid cell may refer to a cell whose entire genome is polyploid, or it may refer to a cell that is polyploid in a particular genomic locus of interest. Without wishing to be bound to theory, it is thought that the abundance of guideRNA may more often be a rate-limiting component in genome engineering of polyploid cells than in haploid cells, and thus the methods using the AD-functionalized CRISPR system described herein may take advantage of using a certain fungal cell type.

[0899] In some embodiments, the fungal cell is a diploid cell. As used herein, a “diploid” cell may refer to any cell whose genome is present in two copies. A diploid cell may refer to a type of cell that is naturally found in a diploid state, or it may refer to a cell that has been induced to exist in a diploid state (e.g., through specific regulation, alteration, inactivation, activation, or modification of meiosis, cytokinesis, or DNA replication). For example, the S. cerevisiae strain S228C may be maintained in a haploid or diploid state. A diploid cell may refer to a cell whose entire genome is diploid, or it may refer to a cell that is diploid in a particular genomic locus of interest. In some embodiments, the fungal cell is a haploid cell. As used herein, a “haploid” cell may refer to any cell whose genome is present in one copy. A haploid cell may refer to a type of cell that is naturally found in a haploid state, or it may refer to a cell that has been induced to exist in a haploid state (e.g., through specific regulation, alteration, inactivation, activation, or modification of meiosis, cytokinesis, or DNA replication). For example, the S. cerevisiae strain S228C may be maintained in a haploid or diploid state. A haploid cell may refer to a cell whose entire genome is haploid, or it may refer to a cell that is haploid in a particular genomic locus of interest.

[0900] As used herein, a “yeast expression vector” refers to a nucleic acid that contains one or more sequences encoding an RNA and/or polypeptide and may further contain any desired elements that control the expression of the nucleic acid(s), as well as any elements that enable the replication and maintenance of the expression vector inside the yeast cell. Many suitable yeast expression vectors and features thereof are known in the art; for example, various vectors and techniques are illustrated in in Yeast Protocols, 2nd edition, Xiao, W., ed. (Humana Press, New York, 2007) and Buckholz, R. G. and Gleeson, M.A. (1991) Biotechnology (NY) 9(11): 1067-72. Yeast vectors may contain, without limitation, a centromeric (CEN) sequence, an autonomous replication sequence (ARS), a promoter, such as an RNA Polymerase III promoter, operably linked to a sequence or gene of interest, a terminator such as an RNA polymerase III terminator, an origin of replication, and a marker gene (e.g., auxotrophic, antibiotic, or other selectable markers). Examples of expression vectors for use in yeast may include plasmids, yeast artificial chromosomes, 2μ plasmids, yeast integrative plasmids, yeast replicative plasmids, shuttle vectors, and episomal plasmids.

### Stable Integration of AD-Functionalized CRISPR System Components in the Genome of Plants and Plant Cells

[0901] In particular embodiments, it is envisaged that the polynucleotides encoding the components of the AD-functionalized CRISPR system are introduced for stable integration into the genome of a plant cell. In these embodiments, the design of the transformation vector or the expression system can be adjusted depending on for when, where and under what conditions the guide RNA and/or fusion protein of nucleotide deaminase and Cas13 are expressed.

[0902] In particular embodiments, it is envisaged to introduce the components of the AD-functionalized CRISPR system stably into the genomic DNA of a plant cell. Additionally or alternatively, it is envisaged to introduce the components of the AD-functionalized CRISPR system for stable integration into the DNA of a plant organelle such as, but not limited to a plastid, e mitochondrion or a chloroplast.

[0903] The expression system for stable integration into the genome of a plant cell may contain one or more of the following elements: a promoter element that can be used to express the RNA and/or fusion protein of nucleotide deaminase and Cas13 in a plant cell; a 5′ untranslated region to enhance expression; an intron element to further enhance expression in certain cells, such as monocot cells; a multiple-cloning site to provide convenient restriction sites for inserting the guide RNA and/or the fusion protein of nucleotide deaminase and Cas13 encoding sequences and other desired elements; and a 3′ untranslated region to provide for efficient termination of the expressed transcript.

[0904] The elements of the expression system may be on one or more expression constructs which are either circular such as a plasmid or transformation vector, or non-circular such as linear double stranded DNA.

[0905] In a particular embodiment, a AD-functionalized CRISPR expression system comprises at least: a nucleotide sequence encoding a guide RNA (gRNA) that hybridizes with a target sequence in a plant, and wherein the guide RNA comprises a guide sequence and a direct repeat sequence, and a nucleotide sequence encoding a fusion protein of nucleotide deaminase and Cas13, wherein components (a) or (b) are located on the same or on different constructs, and whereby the different nucleotide sequences can be under control of the same or a different regulatory element operable in a plant cell.

[0906] DNA construct(s) containing the components of the AD-functionalized CRISPR system, and, where applicable, template sequence may be introduced into the genome of a plant, plant part, or plant cell by a variety of conventional techniques. The process generally comprises the steps of selecting a suitable host cell or host tissue, introducing the construct(s) into the host cell or host tissue, and regenerating plant cells or plants therefrom.

[0907] In particular embodiments, the DNA construct may be introduced into the plant cell using techniques such as but not limited to electroporation, microinjection, aerosol beam injection of plant cell protoplasts, or the DNA constructs can be introduced directly to plant tissue using biolistic methods, such as DNA particle bombardment (see also Fu et al., Transgenic Res. 2000 February; 9(1):11-9). The basis of particle bombardment is the acceleration of particles coated with gene/s of interest toward cells, resulting in the penetration of the protoplasm by the particles and typically stable integration into the genome. (see e.g. Klein et al, Nature (1987), Klein et ah, Bio/Technology (1992), Casas et ah, Proc. Natl. Acad. Sci. USA (1993).).

[0908] In particular embodiments, the DNA constructs containing components of the AD-functionalized CRISPR system may be introduced into the plant by Agrobacterium-mediated transformation. The DNA constructs may be combined with suitable T-DNA flanking regions and introduced into a conventional Agrobacterium tumefaciens host vector. The foreign DNA can be incorporated into the genome of plants by infecting the plants or by incubating plant protoplasts with Agrobacterium bacteria, containing one or more Ti (tumor-inducing) plasmids. (see e.g. Fraley et al., (1985), Rogers et al., (1987) and U.S. Pat. No. 5,563,055).

### Plant Promoters

[0909] In order to ensure appropriate expression in a plant cell, the components of the AD-functionalized CRISPR system described herein are typically placed under control of a plant promoter, i.e. a promoter operable in plant cells. The use of different types of promoters is envisaged.

[0910] A constitutive plant promoter is a promoter that is able to express the open reading frame (ORF) that it controls in all or nearly all of the plant tissues during all or nearly all developmental stages of the plant (referred to as “constitutive expression”). One non-limiting example of a constitutive promoter is the cauliflower mosaic virus 35S promoter. “Regulated promoter” refers to promoters that direct gene expression not constitutively, but in a temporally- and/or spatially-regulated manner, and includes tissue-specific, tissue-preferred and inducible promoters. Different promoters may direct the expression of a gene in different tissues or cell types, or at different stages of development, or in response to different environmental conditions. In particular embodiments, one or more of the AD-functionalized CRISPR components are expressed under the control of a constitutive promoter, such as the cauliflower mosaic virus 35S promoter issue-preferred promoters can be utilized to target enhanced expression in certain cell types within a particular plant tissue, for instance vascular cells in leaves or roots or in specific cells of the seed. Examples of particular promoters for use in the AD-functionalized CRISPR system are found in Kawamata et al., (1997) Plant Cell Physiol 38:792-803; Yamamoto et al., (1997) Plant J 12:255-65; Hire et al, (1992) Plant Mol Biol 20:207-18,Kuster et al, (1995) Plant Mol Biol 29:759-72, and Capana et al., (1994) Plant Mol Biol 25:681-91.

[0911] Inducible promoters can be of interest to express one or more of the components of the AD-functionalized CRISPR system under limited circumstances to avoid non-specific activity of the deaminase. In particular embodiments, one or more elements of the AD-functionalized CRISPR system are expressed under control of an inducible promoter. Examples of promoters that are inducible and that allow for spatiotemporal control of gene editing or gene expression may use a form of energy. The form of energy may include but is not limited to sound energy, electromagnetic radiation, chemical energy and/or thermal energy. Examples of inducible systems include tetracycline inducible promoters (Tet-On or Tet-Off), small molecule two-hybrid transcription activations systems (FKBP, ABA, etc), or light inducible systems (Phytochrome, LOV domains, or cryptochrome)., such as a Light Inducible Transcriptional Effector (LITE) that direct changes in transcriptional activity in a sequence-specific manner. The components of a light inducible system may include a fusion protein of nucleotide deaminase and Cas13, a light-responsive cytochrome heterodimer (e.g. from Arabidopsis thaliana). Further examples of inducible DNA binding proteins and methods for their use are provided in U.S. 61/736,465 and U.S. 61/721,283, which is hereby incorporated by reference in its entirety.

[0912] In particular embodiments, transient or inducible expression can be achieved by using, for example, chemical-regulated promotors, i.e. whereby the application of an exogenous chemical induces gene expression. Modulating of gene expression can also be obtained by a chemical-repressible promoter, where application of the chemical represses gene expression. Chemical-inducible promoters include, but are not limited to, the maize 1n2-2 promoter, activated by benzene sulfonamide herbicide safeners (De Veylder et al., (1997) Plant Cell Physiol 38:568-77), the maize GST promoter (GST-11-27, WO93/01294), activated by hydrophobic electrophilic compounds used as pre-emergent herbicides, and the tobacco PR-1 a promoter (Ono et al., (2004) Biosci Biotechnol Biochem 68:803-7) activated by salicylic acid. Promoters which are regulated by antibiotics, such as tetracycline-inducible and tetracycline-repressible promoters (Gatz et al., (1991) Mol Gen Genet 227:229-37; U.S. Pat. Nos. 5,814,618 and 5,789,156) can also be used herein.

Translocation to and/or Expression in Specific Plant Organelles

[0913] The expression system may comprise elements for translocation to and/or expression in a specific plant organelle.

### Chloroplast Targeting

[0914] In particular embodiments, it is envisaged that the AD-functionalized CRISPR system is used to specifically modify chloroplast genes or to ensure expression in the chloroplast. For this purpose use is made of chloroplast transformation methods or compartimentalization of the AD-functionalized CRISPR components to the chloroplast. For instance, the introduction of genetic modifications in the plastid genome can reduce biosafety issues such as gene flow through pollen.

[0915] Methods of chloroplast transformation are known in the art and include Particle bombardment, PEG treatment, and microinjection. Additionally, methods involving the translocation of transformation cassettes from the nuclear genome to the pastid can be used as described in WO2010061186.

[0916] Alternatively, it is envisaged to target one or more of the AD-functionalized CRISPR components to the plant chloroplast. This is achieved by incorporating in the expression construct a sequence encoding a chloroplast transit peptide (CTP) or plastid transit peptide, operably linked to the 5′ region of the sequence encoding the fusion protein of nucleotide deaminase and Cas13. The CTP is removed in a processing step during translocation into the chloroplast. Chloroplast targeting of expressed proteins is well known to the skilled artisan (see for instance Protein Transport into Chloroplasts, 2010, Annual Review of Plant Biology, Vol. 61: 157-180). In such embodiments it is also desired to target the guide RNA to the plant chloroplast. Methods and constructs which can be used for translocating guide RNA into the chloroplast by means of a chloroplast localization sequence are described, for instance, in US 20040142476, incorporated herein by reference. Such variations of constructs can be incorporated into the expression systems of the invention to efficiently translocate the AD-functionalized CRISPR system components.

### Introduction of Polynucleotides Encoding the AD-Functionalized CRISPR System in Algae Cells.

[0917] Transgenic algae (or other plants such as rape) may be particularly useful in the production of vegetable oils or biofuels such as alcohols (especially methanol and ethanol) or other products. These may be engineered to express or overexpress high levels of oil or alcohols for use in the oil or biofuel industries.

[0918] U.S. Pat. No. 8,945,839 describes a method for engineering Micro-Algae (Chlamydomonas reinhardtii cells) species) using Cas9. Using similar tools, the methods of the AD-functionalized CRISPR system described herein can be applied on Chlamydomonas species and other algae. In particular embodiments, a CRISPR-Cas protein (e.g., Cas13), nucleotide deaminase (which may be fused to the CRISPR-Cas protein or an aptamer-binding adaptor protein), and guide RNA are introduced in algae expressed using a vector that expresses the fusion protein of nucleotide deaminase and Cas13 under the control of a constitutive promoter such as Hsp70A-Rbc S2 or Beta2-tubulin. Guide RNA is optionally delivered using a vector containing T7 promoter. Alternatively, Cas13 mRNA and in vitro transcribed guide RNA can be delivered to algal cells. Electroporation protocols are available to the skilled person such as the standard recommended protocol from the GeneArt Chlamydomonas Engineering kit.

### Introduction of AD-Functionalized CRISPR System Components in Yeast Cells

[0919] In particular embodiments, the invention relates to the use of the AD-functionalized CRISPR system for genome editing of yeast cells. Methods for transforming yeast cells which can be used to introduce polynucleotides encoding the AD-functionalized CRISPR system components are described in Kawai et al., 2010, Bioeng Bugs. 2010 November-December; 1(6): 395-403). Non-limiting examples include transformation of yeast cells by lithium acetate treatment (which may further include carrier DNA and PEG treatment), bombardment or by electroporation.

### Transient Expression of AD-Functionalized CRISPR System Components in Plants and Plant Cell

[0920] In particular embodiments, it is envisaged that the guide RNA and/or CRISPR-Cas gene are transiently expressed in the plant cell. In these embodiments, the AD-functionalized CRISPR system can ensure modification of a target gene only when both the guide RNA, the CRISPR-Cas protein (e.g., Cas13), and nucleotide deaminase (which may be fused to the CRISPR-Cas protein or an aptamer-binding adaptor protein), are present in a cell, such that genomic modification can further be controlled. As the expression of the CRISPR-Cas protein is transient, plants regenerated from such plant cells typically contain no foreign DNA. In particular embodiments the CRISPR-Cas protein is stably expressed by the plant cell and the guide sequence is transiently expressed.

[0921] In particular embodiments, the AD-functionalized CRISPR system components can be introduced in the plant cells using a plant viral vector (Scholthof et al. 1996, Annu Rev Phytopathol. 1996; 34:299-323). In further particular embodiments, said viral vector is a vector from a DNA virus. For example, geminivirus (e.g., cabbage leaf curl virus, bean yellow dwarf virus, wheat dwarf virus, tomato leaf curl virus, maize streak virus, tobacco leaf curl virus, or tomato golden mosaic virus) or nanovirus (e.g., Faba bean necrotic yellow virus). In other particular embodiments, said viral vector is a vector from an RNA virus. For example, tobravirus (e.g., tobacco rattle virus, tobacco mosaic virus), potexvirus (e.g., potato virus X), or hordeivirus (e.g., barley stripe mosaic virus). The replicating genomes of plant viruses are non-integrative vectors.

[0922] In particular embodiments, the vector used for transient expression of AD-functionalized CRISPR system is for instance a pEAQ vector, which is tailored for Agrobacterium-mediated transient expression (Sainsbury F. et al., Plant Biotechnol J. 2009 September; 7(7):682-93) in the protoplast. Precise targeting of genomic locations was demonstrated using a modified Cabbage Leaf Curl virus (CaLCuV) vector to express guide RNAs in stable transgenic plants expressing a CRISPR enzyme (Scientific Reports 5, Article number: 14926 (2015), doi:10.1038/srep14926).

[0923] In particular embodiments, double-stranded DNA fragments encoding the guide RNA and/or the CRISPR-Cas gene can be transiently introduced into the plant cell. In such embodiments, the introduced double-stranded DNA fragments are provided in sufficient quantity to modify the cell but do not persist after a contemplated period of time has passed or after one or more cell divisions. Methods for direct DNA transfer in plants are known by the skilled artisan (see for instance Davey et al. Plant Mol Biol. 1989 September; 13(3):273-85.)

[0924] In other embodiments, an RNA polynucleotide encoding the CRISPR-Cas protein (e.g., Cas13) and/or nucleotide deaminase (which may be fused to the CRISPR-Cas protein or an aptamer-binding adaptor protein) is introduced into the plant cell, which is then translated and processed by the host cell generating the protein in sufficient quantity to modify the cell (in the presence of at least one guide RNA) but which does not persist after a contemplated period of time has passed or after one or more cell divisions. Methods for introducing mRNA to plant protoplasts for transient expression are known by the skilled artisan (see for instance in Gallie, Plant Cell Reports (1993), 13; 119-122).

[0925] Combinations of the different methods described above are also envisaged.

### Delivery of AD-Functionalized CRISPR System Components to the Plant Cell

[0926] In particular embodiments, it is of interest to deliver one or more components of the AD-functionalized CRISPR system directly to the plant cell. This is of interest, inter alia, for the generation of non-transgenic plants (see below). In particular embodiments, one or more of the AD-functionalized CRISPR system components is prepared outside the plant or plant cell and delivered to the cell. For instance in particular embodiments, the CRISPR-Cas protein is prepared in vitro prior to introduction to the plant cell. The CRISPR-Cas protein can be prepared by various methods known by one of skill in the art and include recombinant production. After expression, the CRISPR-Cas protein is isolated, refolded if needed, purified and optionally treated to remove any purification tags, such as a His-tag. Once crude, partially purified, or more completely purified CRISPR-Cas protein is obtained, the protein may be introduced to the plant cell.

[0927] In particular embodiments, the CRISPR-Cas protein is mixed with guide RNA targeting the gene of interest to form a pre-assembled ribonucleoprotein.

[0928] The individual components or pre-assembled ribonucleoprotein can be introduced into the plant cell via electroporation, by bombardment with CRISPR-Cas-associated gene product coated particles, by chemical transfection or by some other means of transport across a cell membrane. For instance, transfection of a plant protoplast with a pre-assembled CRISPR ribonucleoprotein has been demonstrated to ensure targeted modification of the plant genome (as described by Woo et al. Nature Biotechnology, 2015; DOI: 10.1038/nbt.3389).

[0929] In particular embodiments, the AD-functionalized CRISPR system components are introduced into the plant cells using nanoparticles. The components, either as protein or nucleic acid or in a combination thereof, can be uploaded onto or packaged in nanoparticles and applied to the plants (such as for instance described in WO 2008042156 and US 20130185823). In particular, embodiments of the invention comprise nanoparticles uploaded with or packed with DNA molecule(s) encoding the CRISPR-Cas protein (e.g., Cas13), DNA molecule(s) encoding nucleotide deaminase (which may be fused to the CRISPR-Cas protein or an aptamer-binding adaptor protein), and DNA molecules encoding the guide RNA and/or isolated guide RNA as described in WO2015089419.

[0930] Further means of introducing one or more components of the AD-functionalized CRISPR system to the plant cell is by using cell penetrating peptides (CPP). Accordingly, in particular, embodiments the invention comprises compositions comprising a cell penetrating peptide linked to the CRISPR-Cas protein. In particular embodiments of the present invention, the CRISPR-Cas protein and/or guide RNA is coupled to one or more CPPs to effectively transport them inside plant protoplasts. Ramakrishna (Genome Res. 2014 June; 24(6):1020-7 for Cas9 in human cells). In other embodiments, the CRISPR-Cas gene and/or guide RNA are encoded by one or more circular or non-circular DNA molecule(s) which are coupled to one or more CPPs for plant protoplast delivery. The plant protoplasts are then regenerated to plant cells and further to plants. CPPs are generally described as short peptides of fewer than 35 amino acids either derived from proteins or from chimeric sequences which are capable of transporting biomolecules across cell membrane in a receptor independent manner. CPP can be cationic peptides, peptides having hydrophobic sequences, amphipatic peptides, peptides having proline-rich and anti-microbial sequence, and chimeric or bipartite peptides (Pooga and Langel 2005). CPPs are able to penetrate biological membranes and as such trigger the movement of various biomolecules across cell membranes into the cytoplasm and to improve their intracellular routing, and hence facilitate interaction of the biolomolecule with the target. Examples of CPP include amongst others: Tat, a nuclear transcriptional activator protein required for viral replication by HIV type1, penetratin, Kaposi fibroblast growth factor (FGF) signal peptide sequence, integrin β3 signal peptide sequence; polyarginine peptide Args sequence, Guanine rich-molecular transporters, sweet arrow peptide, etc.

### Use of the AD-Functionalized CRISPR System to Make Genetically Modified Non-Transgenic Plants

[0931] In particular embodiments, the methods described herein are used to modify endogenous genes or to modify their expression without the permanent introduction into the genome of the plant of any foreign gene, including those encoding CRISPR components, so as to avoid the presence of foreign DNA in the genome of the plant. This can be of interest as the regulatory requirements for non-transgenic plants are less rigorous.

[0932] In particular embodiments, this is ensured by transient expression of the AD-functionalized CRISPR system components. In particular embodiments one or more of the components are expressed on one or more viral vectors which produce sufficient CRISPR-Cas protein, nucleotide deaminase, and guide RNA to consistently steadily ensure modification of a gene of interest according to a method described herein.

[0933] In particular embodiments, transient expression of AD-functionalized CRISPR system constructs is ensured in plant protoplasts and thus not integrated into the genome. The limited window of expression can be sufficient to allow the AD-functionalized CRISPR system to ensure modification of a target gene as described herein.

[0934] In particular embodiments, the different components of the AD-functionalized CRISPR system are introduced in the plant cell, protoplast or plant tissue either separately or in mixture, with the aid of pariculate delivering molecules such as nanoparticles or CPP molecules as described herein above.

[0935] The expression of the AD-functionalized CRISPR system components can induce targeted modification of the genome, by deaminase activity of the nucleotide deaminase. The different strategies described herein above allow CRISPR-mediated targeted genome editing without requiring the introduction of the AD-functionalized CRISPR system components into the plant genome. Components which are transiently introduced into the plant cell are typically removed upon crossing.

### Plant Cultures and Regeneration

[0936] In particular embodiments, plant cells which have a modified genome and that are produced or obtained by any of the methods described herein, can be cultured to regenerate a whole plant which possesses the transformed or modified genotype and thus the desired phenotype. Conventional regeneration techniques are well known to those skilled in the art. Particular examples of such regeneration techniques rely on manipulation of certain phytohormones in a tissue culture growth medium, and typically relying on a biocide and/or herbicide marker which has been introduced together with the desired nucleotide sequences. In further particular embodiments, plant regeneration is obtained from cultured protoplasts, plant callus, explants, organs, pollens, embryos or parts thereof (see e.g. Evans et al. (1983), Handbook of Plant Cell Culture, Klee et al (1987) Ann. Rev. of Plant Phys.).

[0937] In particular embodiments, transformed or improved plants as described herein can be self-pollinated to provide seed for homozygous improved plants of the invention (homozygous for the DNA modification) or crossed with non-transgenic plants or different improved plants to provide seed for heterozygous plants. Where a recombinant DNA was introduced into the plant cell, the resulting plant of such a crossing is a plant which is heterozygous for the recombinant DNA molecule. Both such homozygous and heterozygous plants obtained by crossing from the improved plants and comprising the genetic modification (which can be a recombinant DNA) are referred to herein as “progeny”. Progeny plants are plants descended from the original transgenic plant and containing the genome modification or recombinant DNA molecule introduced by the methods provided herein. Alternatively, genetically modified plants can be obtained by one of the methods described supra using the AD-functionalized CRISPR system whereby no foreign DNA is incorporated into the genome. Progeny of such plants, obtained by further breeding may also contain the genetic modification. Breedings are performed by any breeding methods that are commonly used for different crops (e.g., Allard, Principles of Plant Breeding, John Wiley & Sons, NY, U. of CA, Davis, Calif., 50-98 (1960).

Generation of Plants with Enhanced Agronomic Traits

[0938] The AD-functionalized CRISPR systems provided herein can be used to introduce targeted A-G and T-C mutations. By co-expression of multiple targeting RNAs directed to achieve multiple modifications in a single cell, multiplexed genome modification can be ensured. This technology can be used to high-precision engineering of plants with improved characteristics, including enhanced nutritional quality, increased resistance to diseases and resistance to biotic and abiotic stress, and increased production of commercially valuable plant products or heterologous compounds.

[0939] In particular embodiments, the AD-functionalized CRISPR system as described herein is used to introduce targeted A-G and T-C mutations. Such mutation can be a nonsense mutation (e.g., premature stop codon) or a missense mutation (e.g., encoding different amino acid residue). This is of interest where the A-G and T-C mutations in certain endogenous genes can confer or contribute to a desired trait.

[0940] The methods described herein generally result in the generation of “improved plants” in that they have one or more desirable traits compared to the wildtype plant. In particular embodiments, the plants, plant cells or plant parts obtained are transgenic plants, comprising an exogenous DNA sequence incorporated into the genome of all or part of the cells of the plant. In particular embodiments, non-transgenic genetically modified plants, plant parts or cells are obtained, in that no exogenous DNA sequence is incorporated into the genome of any of the plant cells of the plant. In such embodiments, the improved plants are non-transgenic. Where only the modification of an endogenous gene is ensured and no foreign genes are introduced or maintained in the plant genome, the resulting genetically modified crops contain no foreign genes and can thus basically be considered non-transgenic.

[0941] In particular embodiments, the polynucleotides are delivered into the cell by a DNA virus (e.g., a geminivirus) or an RNA virus (e.g., a tobravirus). In particular embodiments, the introducing steps include delivering to the plant cell a T-DNA containing one or more polynucleotide sequences encoding the CRISPR-Cas protein, the nucleotide deaminase, and the guide RNA, where the delivering is via Agrobacterium. The polynucleotide sequence encoding the components of the AD-functionalized CRISPR system can be operably linked to a promoter, such as a constitutive promoter (e.g., a cauliflower mosaic virus 35S promoter), or a cell specific or inducible promoter. In particular embodiments, the polynucleotide is introduced by microprojectile bombardment. In particular embodiments, the method further includes screening the plant cell after the introducing steps to determine whether the expression of the gene of interest has been modified. In particular embodiments, the methods include the step of regenerating a plant from the plant cell. In further embodiments, the methods include cross breeding the plant to obtain a genetically desired plant lineage.

[0942] In particular embodiments of the methods described above, disease resistant crops are obtained by targeted mutation of disease susceptibility genes or genes encoding negative regulators (e.g. Mlo gene) of plant defense genes. In a particular embodiment, herbicide-tolerant crops are generated by targeted substitution of specific nucleotides in plant genes such as those encoding acetolactate synthase (ALS) and protoporphyrinogen oxidase (PPO). In particular embodiments drought and salt tolerant crops by targeted mutation of genes encoding negative regulators of abiotic stress tolerance, low amylose grains by targeted mutation of Waxy gene, rice or other grains with reduced rancidity by targeted mutation of major lipase genes in aleurone layer, etc. In particular embodiments. A more extensive list of endogenous genes encoding a traits of interest are listed below.

### Use of AD-Functionalized CRISPR System to Modify Polyploid Plants

[0943] Many plants are polyploid, which means they carry duplicate copies of their genomes—sometimes as many as six, as in wheat. The methods according to the present invention, which make use of the AD-functionalized CRISPR system can be “multiplexed” to affect all copies of a gene, or to target dozens of genes at once. For instance, in particular embodiments, the methods of the present invention are used to simultaneously ensure a loss of function mutation in different genes responsible for suppressing defences against a disease. In particular embodiments, the methods of the present invention are used to simultaneously suppress the expression of the TaMLO-Al, TaMLO-Bl and TaMLO-Dl nucleic acid sequence in a wheat plant cell and regenerating a wheat plant therefrom, in order to ensure that the wheat plant is resistant to powdery mildew (see also WO2015109752).

### Exemplary Genes Conferring Agronomic Traits

[0944] In particular embodiments, the invention encompasses methods which involve targeted A-G and T-C mutations in endogenous genes and their regulatory elements, such as listed below:

1. Genes that Confer Resistance to Pests or Diseases:

[0945] Plant disease resistance genes. A plant can be transformed with cloned resistance genes to engineer plants that are resistant to specific pathogen strains. See, e.g., Jones et al., Science 266:789 (1994) (cloning of the tomato Cf-9 gene for resistance to Cladosporium fulvum); Martin et al., Science 262:1432 (1993) (tomato Pto gene for resistance to Pseudomonas syringae pv. tomato encodes a protein kinase); Mindrinos et al., Cell 78:1089 (1994) (Arabidops may be RSP2 gene for resistance to Pseudomonas syringae). A plant gene that is upregulated or down regulated during pathogen infection can be engineered for pathogen resistance. See, e.g., Thomazella et al., bioRxiv 064824; doi: https://doi.org/10.1101/064824 Epub. Jul. 23, 2016 (tomato plants with deletions in the S1DMR6-1 which is normally upregulated during pathogen infection).

[0946] Genes conferring resistance to a pest, such as soybean cyst nematode. See e.g., PCT Application WO 96/30517; PCT Application WO 93/19181.

[0947] Bacillus thuringiensis proteins see, e.g., Geiser et al., Gene 48:109 (1986).

[0948] Lectins, see, for example, Van Damme et al., Plant Molec. Biol. 24:25 (1994.

[0949] Vitamin-binding protein, such as avidin, see PCT application US93/06487, teaching the use of avidin and avidin homologues as larvicides against insect pests.

[0950] Enzyme inhibitors such as protease or proteinase inhibitors or amylase inhibitors. See, e.g., Abe et al., J. Biol. Chem. 262:16793 (1987), Huub et al., Plant Molec. Biol. 21:985 (1993)), Sumitani et al., Biosci. Biotech. Biochem. 57:1243 (1993) and U.S. Pat. No. 5,494,813.

[0951] Insect-specific hormones or pheromones such as ecdysteroid or juvenile hormone, a variant thereof, a mimetic based thereon, or an antagonist or agonist thereof. See, for example Hammock et al., Nature 344:458 (1990).

[0952] Insect-specific peptides or neuropeptides which, upon expression, disrupts the physiology of the affected pest. For example Regan, J. Biol. Chem. 269:9 (1994) and Pratt et al., Biochem. Biophys. Res. Comm. 163:1243 (1989). See also U.S. Pat. No. 5,266,317.

[0953] Insect-specific venom produced in nature by a snake, a wasp, or any other organism. For example, see Pang et al., Gene 116: 165 (1992).

[0954] Enzymes responsible for a hyperaccumulation of a monoterpene, a sesquiterpene, a steroid, hydroxamic acid, a phenylpropanoid derivative or another nonprotein molecule with insecticidal activity.

[0955] Enzymes involved in the modification, including the post-translational modification, of a biologically active molecule; for example, a glycolytic enzyme, a proteolytic enzyme, a lipolytic enzyme, a nuclease, a cyclase, a transaminase, an esterase, a hydrolase, a phosphatase, a kinase, a phosphorylase, a polymerase, an elastase, a chitinase and a glucanase, whether natural or synthetic. See PCT application WO93/02197, Kramer et al., Insect Biochem. Molec. Biol. 23:691 (1993) and Kawalleck et al., Plant Molec. Biol. 21:673 (1993).

[0956] Molecules that stimulates signal transduction. For example, see Botella et al., Plant Molec. Biol. 24:757 (1994), and Griess et al., Plant Physiol. 104:1467 (1994).

[0957] Viral-invasive proteins or a complex toxin derived therefrom. See Beachy et al., Ann. rev. Phytopathol. 28:451 (1990).

[0958] Developmental-arrestive proteins produced in nature by a pathogen or a parasite. See Lamb et al., Bio/Technology 10:1436 (1992) and Toubart et al., Plant J. 2:367 (1992).

[0959] A developmental-arrestive protein produced in nature by a plant. For example, Logemann et al., Bio/Technology 10:305 (1992).

[0960] In plants, pathogens are often host-specific. For example, some Fusarium species will causes tomato wilt but attacks only tomato, and other Fusarium species attack only wheat. Plants have existing and induced defenses to resist most pathogens. Mutations and recombination events across plant generations lead to genetic variability that gives rise to susceptibility, especially as pathogens reproduce with more frequency than plants. In plants there can be non-host resistance, e.g., the host and pathogen are incompatible or there can be partial resistance against all races of a pathogen, typically controlled by many genes and/or also complete resistance to some races of a pathogen but not to other races. Such resistance is typically controlled by a few genes. Using methods and components of the AD-functionalized CRISPR system, a new tool now exists to induce specific mutations in anticipation hereon. Accordingly, one can analyze the genome of sources of resistance genes, and in plants having desired characteristics or traits, use the method and components of the AD-functionalized CRISPR system to induce the rise of resistance genes. The present systems can do so with more precision than previous mutagenic agents and hence accelerate and improve plant breeding programs.

[0961] 2. Genes Involved in Plant Diseases, Such as Those Listed in WO 2013046247:

[0962] Rice diseases: Magnaporthe grisea, Cochliobolus miyabeanus, Rhizoctonia solani, Gibberella fujikuroi; Wheat diseases: Erysiphe graminis, Fusarium graminearum, F. avenaceum, F. culmorum, Microdochium nivale, Puccinia striiformis, P. graminis, P. recondita, Micronectriella nivale, Typhula sp., Ustilago tritici, Tilletia caries, Pseudocercosporella herpotrichoides, Mycosphaerella graminicola, Stagonospora nodorum, Pyrenophora tritici-repentis; Barley diseases: Erysiphe graminis, Fusarium graminearum, F. avenaceum, F. culmorum, Microdochium nivale, Puccinia striiformis, P. graminis, P. hordei, Ustilago nuda, Rhynchosporium secalis, Pyrenophora teres, Cochliobolus sativus, Pyrenophora graminea, Rhizoctonia solani;Maize diseases: Ustilago maydis, Cochliobolus heterostrophus, Gloeocercospora sorghi, Puccinia polysora, Cercospora zeae-maydis, Rhizoctonia solani; Citrus diseases: Diaporthe citri, Elsinoe fawcetti, Penicillium digitatum, P. italicum, Phytophthora parasitica, Phytophthora citrophthora;Apple diseases: Monilinia mali, Valsa ceratosperma, Podosphaera leucotricha, Alternaria alternata apple pathotype, Venturia inaequalis, Colletotrichum acutatum, Phytophtora cactorum;

[0963] Pear diseases: Venturia nashicola, V. pirina, Alternaria alternata Japanese pear pathotype, Gymnosporangium haraeanum, Phytophtora cactorum;

[0964] Peach diseases: Monilinia fructicola, Cladosporium carpophilum, Phomopsis sp.;

[0965] Grape diseases: Elsinoe ampelina, Glomerella cingulata, Uninula necator, Phakopsora ampelopsidis, Guignardia bidwellii, Plasmopara viticola;

[0966] Persimmon diseases: Gloesporium kaki, Cercospora kaki, Mycosphaerela nawae;

[0967] Gourd diseases: Colletotrichum lagenarium, Sphaerotheca fuliginea, Mycosphaerella melonis, Fusarium oxysporum, Pseudoperonospora cubensis, Phytophthora sp., Pythium sp.;

[0968] Tomato diseases: Alternaria solani, Cladosporium fulvum, Phytophthora infestans; Pseudomonas syringae pv. Tomato; Phytophthora capsici; Xanthomonas

[0969] Eggplant diseases: Phomopsis vexans, Erysiphe cichoracearum; Brassicaceous vegetable diseases: Alternaria japonica, Cercosporella brassicae, Plasmodiophora brassicae, Peronospora parasitica;

[0970] Welsh onion diseases: Puccinia allii, Peronospora destructor;

[0971] Soybean diseases: Cercospora kikuchii, Elsinoe glycines, Diaporthe phaseolorum var. sojae, Septoria glycines, Cercospora sojina, Phakopsora pachyrhizi, Phytophthora sojae, Rhizoctonia solani, Corynespora casiicola, Sclerotinia sclerotiorum;

[0972] Kidney bean diseases: Colletrichum lindemthianum;

[0973] Peanut diseases: Cercospora personata, Cercospora arachidicola, Sclerotium rolfsii;

[0974] Pea diseases pea: Erysiphe pisi;

[0975] Potato diseases: Alternaria solani, Phytophthora infestans, Phytophthora erythroseptica, Spongospora subterranean, f sp. Subterranean;

[0976] Strawberry diseases: Sphaerotheca humuli, Glomerella cingulata;

[0977] Tea diseases: Exobasidium reticulatum, Elsinoe leucospila, Pestalotiopsis sp., Colletotrichum theae-sinensis;

[0978] Tobacco diseases: Alternaria longipes, Erysiphe cichoracearum, Colletotrichum tabacum, Peronospora tabacina, Phytophthora nicotianae;

[0979] Rapeseed diseases: Sclerotinia sclerotiorum, Rhizoctonia solani;

[0980] Cotton diseases: Rhizoctonia solani;

[0981] Beet diseases: Cercospora beticola, Thanatephorus cucumeris, Thanatephorus cucumeris, Aphanomyces cochlioides;

[0982] Rose diseases: Diplocarpon rosae, Sphaerotheca pannosa, Peronospora sparsa;

[0983] Diseases of chrysanthemum and asteraceae: Bremia lactuca, Septoria chrysanthemi-indici, Puccinia horiana;

[0984] Diseases of various plants: Pythium aphanidermatum, Pythium debarianum, Pythium graminicola, Pythium irregulare, Pythium ultimum, Botrytis cinerea, Sclerotinia sclerotiorum;

[0985] Radish diseases: Alternaria brassicicola;

[0986] Zoysia diseases: Sclerotinia homeocarpa, Rhizoctonia solani;

[0987] Banana diseases: Mycosphaerella fijiensis, Mycosphaerella musicola;

[0988] Sunflower diseases: Plasmopara halstedii;

[0989] Seed diseases or diseases in the initial stage of growth of various plants caused by Aspergillus spp., Penicillium spp., Fusarium spp., Gibberella spp., Tricoderma spp., Thielaviopsis spp., Rhizopus spp., Mucor spp., Corticium spp., Rhoma spp., Rhizoctonia spp., Diplodia spp., or the like;

[0990] Virus diseases of various plants mediated by Polymixa spp., Olpidium spp., or the like.

[0991] 3. Examples of Genes that Confer Resistance to Herbicides:

[0992] Resistance to herbicides that inhibit the growing point or meristem, such as an imidazolinone or a sulfonylurea, for example, by Lee et al., EMBO J. 7:1241 (1988), and Miki et al., Theor. Appl. Genet. 80:449 (1990), respectively.

[0993] Glyphosate tolerance (resistance conferred by, e.g., mutant 5-enolpyruvylshikimate-3-phosphate synthase (EPSPs) genes, aroA genes and glyphosate acetyl transferase (GAT) genes, respectively), or resistance to other phosphono compounds such as by glufosinate (phosphinothricin acetyl transferase (PAT) genes from Streptomyces species, including Streptomyces hygroscopicus and Streptomyces viridichromogenes), and to pyridinoxy or phenoxy proprionic acids and cyclohexones by ACCase inhibitor-encoding genes. See, for example, U.S. Pat. Nos. 4,940,835 and 6,248,876, 4,769,061, EP No. 0 333 033 and U.S. Pat. No. 4,975,374. See also EP No. 0242246, DeGreef et al., Bio/Technology 7:61 (1989), Marshall et al., Theor. Appl. Genet. 83:435 (1992), WO 2005012515 to Castle et. al. and WO 2005107437.

[0994] Resistance to herbicides that inhibit photosynthesis, such as a triazine (psbA and gs+ genes) or a benzonitrile (nitrilase gene), and glutathione S-transferase in Przibila et al., Plant Cell 3:169 (1991), U.S. Pat. No. 4,810,648, and Hayes et al., Biochem. J. 285: 173 (1992).

[0995] Genes encoding Enzymes detoxifying the herbicide or a mutant glutamine synthase enzyme that is resistant to inhibition, e.g. n U.S. patent application Ser. No. 11/760,602. Or a detoxifying enzyme is an enzyme encoding a phosphinothricin acetyltransferase (such as the bar or pat protein from Streptomyces species). Phosphinothricin acetyltransferases are for example described in U.S. Pat. Nos. 5,561,236; 5,648,477; 5,646,024; 5,273,894; 5,637,489; 5,276,268; 5,739,082; 5,908,810 and 7,112,665.

[0996] Hydroxyphenylpyruvatedioxygenases (HPPD) inhibitors, naturally occurring HPPD resistant enzymes, or genes encoding a mutated or chimeric HPPD enzyme as described in WO 96/38567, WO 99/24585, and WO 99/24586, WO 2009/144079, WO 2002/046387, or U.S. Pat. No. 6,768,044.

[0997] 4. Examples of Genes Involved in Abiotic Stress Tolerance:

[0998] Transgene capable of reducing the expression and/or the activity of poly(ADP-ribose) polymerase (PARP) gene in the plant cells or plants as described in WO 00/04173 or, WO/2006/045633.

[0999] Transgenes capable of reducing the expression and/or the activity of the PARG encoding genes of the plants or plants cells, as described e.g. in WO 2004/090140.

[1000] Transgenes coding for a plant-functional enzyme of the nicotineamide adenine dinucleotide salvage synthesis pathway including nicotinamidase, nicotinate phosphoribosyltransferase, nicotinic acid mononucleotide adenyl transferase, nicotinamide adenine dinucleotide synthetase or nicotine amide phosphorybosyltransferase as described e.g. in EP 04077624.7, WO 2006/133827, PCT/EP07/002,433, EP 1999263, or WO 2007/107326.

[1001] Enzymes involved in carbohydrate biosynthesis include those described in e.g. EP 0571427, WO 95/04826, EP 0719338, WO 96/15248, WO 96/19581, WO 96/27674, WO 97/11188, WO 97/26362, WO 97/32985, WO 97/42328, WO 97/44472, WO 97/45545, WO 98/27212, WO 98/40503, WO99/58688, WO 99/58690, WO 99/58654, WO 00/08184, WO 00/08185, WO 00/08175, WO 00/28052, WO 00/77229, WO 01/12782, WO 01/12826, WO 02/101059, WO 03/071860, WO 2004/056999, WO 2005/030942, WO 2005/030941, WO 2005/095632, WO 2005/095617, WO 2005/095619, WO 2005/095618, WO 2005/123927, WO 2006/018319, WO 2006/103107, WO 2006/108702, WO 2007/009823, WO 00/22140, WO 2006/063862, WO 2006/072603, WO 02/034923, EP 06090134.5, EP 06090228.5, EP 06090227.7, EP 07090007.1, EP 07090009.7, WO 01/14569, WO 02/79410, WO 03/33540, WO 2004/078983, WO 01/19975, WO 95/26407, WO 96/34968, WO 98/20145, WO 99/12950, WO 99/66050, WO 99/53072, U.S. Pat. No. 6,734,341, WO 00/11192, WO 98/22604, WO 98/32326, WO 01/98509, WO 01/98509, WO 2005/002359, U.S. Pat. Nos. 5,824,790, 6,013,861, WO 94/04693, WO 94/09144, WO 94/11520, WO 95/35026 or WO 97/20936 or enzymes involved in the production of polyfructose, especially of the inulin and levan-type, as disclosed in EP 0663956, WO 96/01904, WO 96/21023, WO 98/39460, and WO 99/24593, the production of alpha-1,4-glucans as disclosed in WO 95/31553, US 2002031826, U.S. Pat. Nos. 6,284,479, 5,712,107, WO 97/47806, WO 97/47807, WO 97/47808 and WO 00/14249, the production of alpha-1,6 branched alpha-1,4-glucans, as disclosed in WO 00/73422, the production of alternan, as disclosed in e.g. WO 00/47727, WO 00/73422, EP 06077301.7, U.S. Pat. No. 5,908,975 and EP 0728213, the production of hyaluronan, as for example disclosed in WO 2006/032538, WO 2007/039314, WO 2007/039315, WO 2007/039316, JP 2006304779, and WO 2005/012529.

[1002] Genes that improve drought resistance. For example, WO 2013122472 discloses that the absence or reduced level of functional Ubiquitin Protein Ligase protein (UPL) protein, more specifically, UPL3, leads to a decreased need for water or improved resistance to drought of said plant. Other examples of transgenic plants with increased drought tolerance are disclosed in, for example, US 2009/0144850, US 2007/0266453, and WO 2002/083911. US2009/0144850 describes a plant displaying a drought tolerance phenotype due to altered expression of a DR02 nucleic acid. US 2007/0266453 describes a plant displaying a drought tolerance phenotype due to altered expression of a DR03 nucleic acid and WO 2002/08391 1 describes a plant having an increased tolerance to drought stress due to a reduced activity of an ABC transporter which is expressed in guard cells. Another example is the work by Kasuga and co-authors (1999), who describe that overexpression of cDNA encoding DREB1 A in transgenic plants activated the expression of many stress tolerance genes under normal growing conditions and resulted in improved tolerance to drought, salt loading, and freezing. However, the expression of DREB1A also resulted in severe growth retardation under normal growing conditions (Kasuga (1999) Nat Biotechnol 17(3) 287-291).

[1003] In further particular embodiments, crop plants can be improved by influencing specific plant traits. For example, by developing pesticide-resistant plants, improving disease resistance in plants, improving plant insect and nematode resistance, improving plant resistance against parasitic weeds, improving plant drought tolerance, improving plant nutritional value, improving plant stress tolerance, avoiding self-pollination, plant forage digestibility biomass, grain yield etc. A few specific non-limiting examples are provided hereinbelow.

[1004] In addition to targeted mutation of single genes, AD-functionalized CRISPR system can be designed to allow targeted mutation of multiple genes, deletion of chromosomal fragment, site-specific integration of transgene, site-directed mutagenesis in vivo, and precise gene replacement or allele swapping in plants. Therefore, the methods described herein have broad applications in gene discovery and validation, mutational and cisgenic breeding, and hybrid breeding. These applications facilitate the production of a new generation of genetically modified crops with various improved agronomic traits such as herbicide resistance, disease resistance, abiotic stress tolerance, high yield, and superior quality.

### Use of AD-Functionalized CRISPR System to Create Male Sterile Plants

[1005] Hybrid plants typically have advantageous agronomic traits compared to inbred plants. However, for self-pollinating plants, the generation of hybrids can be challenging. In different plant types, genes have been identified which are important for plant fertility, more particularly male fertility. For instance, in maize, at least two genes have been identified which are important in fertility (Amitabh Mohanty International Conference on New Plant Breeding Molecular Technologies Technology Development And Regulation, Oct. 9-10, 2014, Jaipur, India; Svitashev et al. Plant Physiol. 2015 October; 169(2):931-45; Djukanovic et al. Plant J. 2013 December; 76(5):888-99). The methods and systems provided herein can be used to target genes required for male fertility so as to generate male sterile plants which can easily be crossed to generate hybrids. In particular embodiments, the AD-functionalized CRISPR system provided herein is used for targeted mutagenesis of the cytochrome P450-like gene (MS26) or the meganuclease gene (MS45) thereby conferring male sterility to the maize plant. Maize plants which are as such genetically altered can be used in hybrid breeding programs.

### Increasing the Fertility Stage in Plants

[1006] In particular embodiments, the methods and systems provided herein are used to prolong the fertility stage of a plant such as of a rice plant. For instance, a rice fertility stage gene such as Ehd3 can be targeted in order to generate a mutation in the gene and plantlets can be selected for a prolonged regeneration plant fertility stage (as described in CN 104004782)

### Use of AD-Functionalized CRISPR System to Generate Genetic Variation in a Crop of Interest

[1007] The availability of wild germplasm and genetic variations in crop plants is the key to crop improvement programs, but the available diversity in germplasms from crop plants is limited. The present invention envisages methods for generating a diversity of genetic variations in a germplasm of interest. In this application of the AD-functionalized CRISPR system a library of guide RNAs targeting different locations in the plant genome is provided and is introduced into plant cells together with the CRISPR-Cas protein and nucleotide deaminase. In this way a collection of genome-scale point mutations and gene knock-outs can be generated. In particular embodiments, the methods comprise generating a plant part or plant from the cells so obtained and screening the cells for a trait of interest. The target genes can include both coding and non-coding regions. In particular embodiments, the trait is stress tolerance and the method is a method for the generation of stress-tolerant crop varieties

### Use of AD-Functionalized CRISPR to Affect Fruit-Ripening

[1008] Ripening is a normal phase in the maturation process of fruits and vegetables. Only a few days after it starts it renders a fruit or vegetable inedible. This process brings significant losses to both farmers and consumers. In particular embodiments, the methods of the present invention are used to reduce ethylene production. This is ensured by ensuring one or more of the following: a. Suppression of ACC synthase gene expression. ACC (1-aminocyclopropane-1-carboxylic acid) synthase is the enzyme responsible for the conversion of S-adenosylmethionine (SAM) to ACC; the second to the last step in ethylene biosynthesis. Enzyme expression is hindered when an antisense (“mirror-image”) or truncated copy of the synthase gene is inserted into the plant's genome; b. Insertion of the ACC deaminase gene. The gene coding for the enzyme is obtained from Pseudomonas chlororaphis, a common nonpathogenic soil bacterium. It converts ACC to a different compound thereby reducing the amount of ACC available for ethylene production; c. Insertion of the SAM hydrolase gene. This approach is similar to ACC deaminase wherein ethylene production is hindered when the amount of its precursor metabolite is reduced; in this case SAM is converted to homoserine. The gene coding for the enzyme is obtained from E. coli T3 bacteriophage and d. Suppression of ACC oxidase gene expression. ACC oxidase is the enzyme which catalyzes the oxidation of ACC to ethylene, the last step in the ethylene biosynthetic pathway. Using the methods described herein, down regulation of the ACC oxidase gene results in the suppression of ethylene production, thereby delaying fruit ripening. In particular embodiments, additionally or alternatively to the modifications described above, the methods described herein are used to modify ethylene receptors, so as to interfere with ethylene signals obtained by the fruit. In particular embodiments, expression of the ETR1 gene, encoding an ethylene binding protein is modified, more particularly suppressed. In particular embodiments, additionally or alternatively to the modifications described above, the methods described herein are used to modify expression of the gene encoding Polygalacturonase (PG), which is the enzyme responsible for the breakdown of pectin, the substance that maintains the integrity of plant cell walls. Pectin breakdown occurs at the start of the ripening process resulting in the softening of the fruit. Accordingly, in particular embodiments, the methods described herein are used to introduce a mutation in the PG gene or to suppress activation of the PG gene in order to reduce the amount of PG enzyme produced thereby delaying pectin degradation.

[1009] Thus in particular embodiments, the methods comprise the use of the AD-functionalized CRISPR system to ensure one or more modifications of the genome of a plant cell such as described above, and regenerating a plant therefrom. In particular embodiments, the plant is a tomato plant.

### Increasing Storage Life of Plants

[1010] In particular embodiments, the methods of the present invention are used to modify genes involved in the production of compounds which affect storage life of the plant or plant part. More particularly, the modification is in a gene that prevents the accumulation of reducing sugars in potato tubers. Upon high-temperature processing, these reducing sugars react with free amino acids, resulting in brown, bitter-tasting products and elevated levels of acrylamide, which is a potential carcinogen. In particular embodiments, the methods provided herein are used to reduce or inhibit expression of the vacuolar invertase gene (VInv), which encodes a protein that breaks down sucrose to glucose and fructose (Clasen et al. DOI: 10.1111/pbi.12370).

### The Use of the AD-Functionalized CRISPR System to Ensure a Value Added Trait

[1011] In particular embodiments the AD-functionalized CRISPR system is used to produce nutritionally improved agricultural crops. In particular embodiments, the methods provided herein are adapted to generate “functional foods”, i.e. a modified food or food ingredient that may provide a health benefit beyond the traditional nutrients it contains and or “nutraceutical”, i.e. substances that may be considered a food or part of a food and provides health benefits, including the prevention and treatment of disease. In particular embodiments, the nutraceutical is useful in the prevention and/or treatment of one or more of cancer, diabetes, cardiovascular disease, and hypertension.

[1012] Examples of nutritionally improved crops include (Newell-McGloughlin, Plant Physiology, July 2008, Vol. 147, pp. 939-953):

[1013] Modified protein quality, content and/or amino acid composition, such as have been described for Bahiagrass (Luciani et al. 2005, Florida Genetics Conference Poster), Canola (Roesler et al., 1997, Plant Physiol 113 75-81), Maize (Cromwell et al, 1967, 1969 J Anim Sci 26 1325-1331, O'Quin et al. 2000 J Anim Sci 78 2144-2149, Yang et al. 2002, Transgenic Res 11 11-20, Young et al. 2004, Plant J 38 910-922), Potato (Yu J and Ao, 1997 Acta Bot Sin 39 329-334; Chakraborty et al. 2000, Proc Natl Acad Sci USA 97 3724-3729; Li et al. 2001) Chin Sci Bull 46 482-484, Rice (Katsube et al. 1999, Plant Physiol 120 1063-1074), Soybean (Dinkins et al. 2001, Rapp 2002, In Vitro Cell Dev Biol Plant 37 742-747), Sweet Potato (Egnin and Prakash 1997, In Vitro Cell Dev Biol 33 52A).

[1014] Essential amino acid content, such as has been described for Canola (Falco et al. 1995, Bio/Technology 13 577-582), Lupin (White et al. 2001, J Sci Food Agric 81 147-154), Maize (Lai and Messing, 2002, Agbios 2008 GM crop database (Mar. 11, 2008)), Potato (Zeh et al. 2001, Plant Physiol 127 792-802), Sorghum (Zhao et al. 2003, Kluwer Academic Publishers, Dordrecht, The Netherlands, pp 413-416), Soybean (Falco et al. 1995 Bio/Technology 13 577-582; Galili et al. 2002 Crit Rev Plant Sci 21 167-204).

[1015] Oils and Fatty acids such as for Canola (Dehesh et al. (1996) Plant J 9 167-172 [PubMed]; Del Vecchio (1996) INFORM International News on Fats, Oils and Related Materials 7 230-243; Roesler et al. (1997) Plant Physiol 113 75-81 [PMC free article] [PubMed]; Froman and Ursin (2002, 2003) Abstracts of Papers of the American Chemical Society 223 U35; James et al. (2003) Am J Clin Nutr 77 1140-1145 [PubMed]; Agbios (2008, above); coton (Chapman et al. (2001). J Am Oil Chem Soc 78 941-947; Liu et al. (2002) J Am Coll Nutr 21 205S-211S [PubMed]; O'Neill (2007) Australian Life Scientist. http://www.biotechnews.com.au/index.php/id; 866694817;fp; 4;fpid; 2 (Jun. 17, 2008), Linseed (Abbadi et al., 2004, Plant Cell 16: 2734-2748), Maize (Young et al., 2004, Plant J 38 910-922), oil palm (Jalani et al. 1997, J Am Oil Chem Soc 74 1451-1455; Parveez, 2003, AgBiotechNet 113 1-8), Rice (Anai et al., 2003, Plant Cell Rep 21 988-992), Soybean (Reddy and Thomas, 1996, Nat Biotechnol 14 639-642; Kinney and Kwolton, 1998, Blackie Academic and Professional, London, pp 193-213), Sunflower (Arcadia, Biosciences 2008)

[1016] Carbohydrates, such as Fructans described for Chicory (Smeekens (1997) Trends Plant Sci 2 286-287, Sprenger et al. (1997) FEBS Lett 400 355-358, Sëvenier et al. (1998) Nat Biotechnol 16 843-846), Maize (Caimi et al. (1996) Plant Physiol 110 355-363), Potato (Hellwege et al., 1997 Plant J 12 1057-1065), Sugar Beet (Smeekens et al. 1997, above), Inulin, such as described for Potato (Hellewege et al. 2000, Proc Natl Acad Sci USA 97 8699-8704), Starch, such as described for Rice (Schwall et al. (2000) Nat Biotechnol 18 551-554, Chiang et al. (2005) Mol Breed 15 125-143),

[1017] Vitamins and carotenoids, such as described for Canola (Shintani and DellaPenna (1998) Science 282 2098-2100), Maize (Rocheford et al. (2002). J Am Coll Nutr 21 191S-198S, Cahoon et al. (2003) Nat Biotechnol 21 1082-1087, Chen et al. (2003) Proc Natl Acad Sci USA 100 3525-3530), Mustardseed (Shewmaker et al. (1999) Plant J 20 401-412, Potato (Ducreux et al., 2005, J Exp Bot 56 81-89), Rice (Ye et al. (2000) Science 287 303-305, Strawberry (Agius et al. (2003), Nat Biotechnol 21 177-181), Tomato (Rosati et al. (2000) Plant J 24 413-419, Fraser et al. (2001) J Sci Food Agric 81 822-827, Mehta et al. (2002) Nat Biotechnol 20 613-618, Diaz de la Garza et al. (2004) Proc Natl Acad Sci USA 101 13720-13725, Enfissi et al. (2005) Plant Biotechnol J 3 17-27, DellaPenna (2007) Proc Natl Acad Sci USA 104 3675-3676.

[1018] Functional secondary metabolites, such as described for Apple (stilbenes, Szankowski et al. (2003) Plant Cell Rep 22: 141-149), Alfalfa (resveratrol, Hipskind and Paiva (2000) Mol Plant Microbe Interact 13 551-562), Kiwi (resveratrol, Kobayashi et al. (2000) Plant Cell Rep 19 904-910), Maize and Soybean (flavonoids, Yu et al. (2000) Plant Physiol 124 781-794), Potato (anthocyanin and alkaloid glycoside, Lukaszewicz et al. (2004) J Agric Food Chem 52 1526-1533), Rice (flavonoids & resveratrol, Stark-Lorenzen et al. (1997) Plant Cell Rep 16 668-673, Shin et al. (2006) Plant Biotechnol J 4 303-315), Tomato (+resveratrol, chlorogenic acid, flavonoids, stilbene; Rosati et al. (2000) above, Muir et al. (2001) Nature 19 470-474, Niggeweg et al. (2004) Nat Biotechnol 22 746-754, Giovinazzo et al. (2005) Plant Biotechnol J 3 57-69), wheat (caffeic and ferulic acids, resveratrol; United Press International (2002)); and

[1019] Mineral availabilities such as described for Alfalfa (phytase, Austin-Phillips et al. (1999) http://www.molecularfarming.com/nonmedical.html), Lettuse (iron, Goto et al. (2000) Theor Appl Genet 100 658-664), Rice (iron, Lucca et al. (2002) J Am Coll Nutr 21 184S-190S), Maize, Soybean and wheate (phytase, Drakakaki et al. (2005) Plant Mol Biol 59 869-880, Denbow et al. (1998) Poult Sci 77 878-881, Brinch-Pedersen et al. (2000) Mol Breed 6 195-206).

[1020] In particular embodiments, the value-added trait is related to the envisaged health benefits of the compounds present in the plant. For instance, in particular embodiments, the value-added crop is obtained by applying the methods of the invention to ensure the modification of or induce/increase the synthesis of one or more of the following compounds:
[1021] Carotenoids, such as α-Carotene present in carrots which Neutralizes free radicals that may cause damage to cells or β-Carotene present in various fruits and vegetables which neutralizes free radicals;
[1022] Lutein present in green vegetables which contributes to maintenance of healthy vision;
[1023] Lycopene present in tomato and tomato products, which is believed to reduce the risk of prostate cancer;
[1024] Zeaxanthin, present in citrus and maize, which contributes to mainteance of healthy vision
[1025] Dietary fiber such as insoluble fiber present in wheat bran which may reduce the risk of breast and/or colon cancer and β-Glucan present in oat, soluble fiber present in Psylium and whole cereal grains which may reduce the risk of cardiovascular disease (CVD);
[1026] Fatty acids, such as ω-3 fatty acids which may reduce the risk of CVD and improve mental and visual functions, Conjugated linoleic acid, which may improve body composition, may decrease risk of certain cancers and GLA which may reduce inflammation risk of cancer and CVD, may improve body composition;
[1027] Flavonoids such as Hydroxycinnamates, present in wheat which have Antioxidant-like activities, may reduce risk of degenerative diseases, flavonols, catechins and tannins present in fruits and vegetables which neutralize free radicals and may reduce risk of cancer;
[1028] Glucosinolates, indoles, isothiocyanates, such as Sulforaphane, present in Cruciferous vegetables (broccoli, kale), horseradish, which neutralize free radicals, may reduce risk of cancer;
[1029] Phenolics, such as stilbenes present in grape which May reduce risk of degenerative diseases, heart disease, and cancer, may have longevity effect and caffeic acid and ferulic acid present in vegetables and citrus which have Antioxidant-like activities, may reduce risk of degenerative diseases, heart disease, and eye disease, and epicatechin present in cacao which has Antioxidant-like activities, may reduce risk of degenerative diseases and heart disease;
[1030] Plant stanols/sterols present in maize, soy, wheat and wooden oils which May reduce risk of coronary heart disease by lowering blood cholesterol levels;
[1031] Fructans, inulins, fructo-oligosaccharides present in Jerusalem artichoke, shallot, onion powder which may improve gastrointestinal health;
[1032] Saponins present in soybean, which may lower LDL cholesterol;
[1033] Soybean protein present in soybean which may reduce risk of heart disease;
[1034] Phytoestrogens such as isoflavones present in soybean which May reduce menopause symptoms, such as hot flashes, may reduce osteoporosis and CVD and lignans present in flax, rye and vegetables, which May protect against heart disease and some cancers, may lower LDL cholesterol, total cholesterol.;
[1035] Sulfides and thiols such as diallyl sulphide present in onion, garlic, olive, leek and scallon and Allyl methyl trisulfide, dithiolthiones present in cruciferous vegetables which may lower LDL cholesterol, helps to maintain healthy immune system; and
[1036] Tannins, such as proanthocyanidins, present in cranberry, cocoa, which may improve urinary tract health, may reduce risk of CVD and high blood pressure.

[1037] In addition, the methods of the present invention also envisage modifying protein/starch functionality, shelf life, taste/aesthetics, fiber quality, and allergen, antinutrient, and toxin reduction traits.

[1038] Accordingly, the invention encompasses methods for producing plants with nutritional added value, said methods comprising introducing into a plant cell a gene encoding an enzyme involved in the production of a component of added nutritional value using the AD-functionalized CRISPR system as described herein and regenerating a plant from said plant cell, said plant characterized in an increase expression of said component of added nutritional value. In particular embodiments, the AD-functionalized CRISPR system is used to modify the endogenous synthesis of these compounds indirectly, e.g. by modifying one or more transcription factors that controls the metabolism of this compound. Methods for introducing a gene of interest into a plant cell and/or modifying an endogenous gene using the AD-functionalized CRISPR system are described herein above.

[1039] Some specific examples of modifications in plants that have been modified to confer value-added traits are: plants with modified fatty acid metabolism, for example, by transforming a plant with an antisense gene of stearyl-ACP desaturase to increase stearic acid content of the plant. See Knultzon et al., Proc. Natl. Acad. Sci. U.S.A. 89:2624 (1992). Another example involves decreasing phytate content, for example by cloning and then reintroducing DNA associated with the single allele which may be responsible for maize mutants characterized by low levels of phytic acid. See Raboy et al, Maydica 35:383 (1990).

[1040] Similarly, expression of the maize (Zea mays) Tfs C1 and R, which regulate the production of flavonoids in maize aleurone layers under the control of a strong promoter, resulted in a high accumulation rate of anthocyanins in Arabidopsis (Arabidopsis thaliana), presumably by activating the entire pathway (Bruce et al., 2000, Plant Cell 12:65-80). DellaPenna (Welsch et al., 2007 Annu Rev Plant Biol 57: 711-738) found that Tf RAP2.2 and its interacting partner SINAT2 increased carotenogenesis in Arabidopsis leaves. Expressing the Tf Dof1 induced the up-regulation of genes encoding enzymes for carbon skeleton production, a marked increase of amino acid content, and a reduction of the Glc level in transgenic Arabidopsis (Yanagisawa, 2004 Plant Cell Physiol 45: 386-391), and the DOF Tf AtDof1.1 (OBP2) up-regulated all steps in the glucosinolate biosynthetic pathway in Arabidopsis (Skirycz et al., 2006 Plant J 47: 10-24).

### Reducing Allergen in Plants

[1041] In particular embodiments the methods provided herein are used to generate plants with a reduced level of allergens, making them safer for the consumer. In particular embodiments, the methods comprise modifying expression of one or more genes responsible for the production of plant allergens. For instance, in particular embodiments, the methods comprise down-regulating expression of a Lol p5 gene in a plant cell, such as a ryegrass plant cell and regenerating a plant therefrom so as to reduce allergenicity of the pollen of said plant (Bhalla et al. 1999, Proc. Natl. Acad. Sci. USA Vol. 96: 11676-11680).

[1042] Peanut allergies and allergies to legumes generally are a real and serious health concern. The AD-functionalized CRISPR system of the present invention can be used to identify and then mutate genes encoding allergenic proteins of such legumes. Without limitation as to such genes and proteins, Nicolaou et al. identifies allergenic proteins in peanuts, soybeans, lentils, peas, lupin, green beans, and mung beans. See, Nicolaou et al., Current Opinion in Allergy and Clinical Immunology 2011; 11(3):222).

### Screening Methods for Endogenous Genes of Interest

[1043] The methods provided herein further allow the identification of genes of value encoding enzymes involved in the production of a component of added nutritional value or generally genes affecting agronomic traits of interest, across species, phyla, and plant kingdom. By selectively targeting e.g. genes encoding enzymes of metabolic pathways in plants using the AD-functionalized CRISPR system as described herein, the genes responsible for certain nutritional aspects of a plant can be identified. Similarly, by selectively targeting genes which may affect a desirable agronomic trait, the relevant genes can be identified. Accordingly, the present invention encompasses screening methods for genes encoding enzymes involved in the production of compounds with a particular nutritional value and/or agronomic traits.

### Further Applications of the AD-Functionalized CRISPR System in Plants and Yeasts

### Use of AD-Functionalized CRISPR System in Biofuel Production

[1044] The term “biofuel” as used herein is an alternative fuel made from plant and plant-derived resources. Renewable biofuels can be extracted from organic matter whose energy has been obtained through a process of carbon fixation or are made through the use or conversion of biomass. This biomass can be used directly for biofuels or can be converted to convenient energy containing substances by thermal conversion, chemical conversion, and biochemical conversion. This biomass conversion can result in fuel in solid, liquid, or gas form. There are two types of biofuels: bioethanol and biodiesel. Bioethanol is mainly produced by the sugar fermentation process of cellulose (starch), which is mostly derived from maize and sugar cane. Biodiesel on the other hand is mainly produced from oil crops such as rapeseed, palm, and soybean. Biofuels are used mainly for transportation.

### Enhancing Plant Properties for Biofuel Production

[1045] In particular embodiments, the methods using the AD-functionalized CRISPR system as described herein are used to alter the properties of the cell wall in order to facilitate access by key hydrolysing agents for a more efficient release of sugars for fermentation. In particular embodiments, the biosynthesis of cellulose and/or lignin are modified. Cellulose is the major component of the cell wall. The biosynthesis of cellulose and lignin are co-regulated. By reducing the proportion of lignin in a plant the proportion of cellulose can be increased. In particular embodiments, the methods described herein are used to downregulate lignin biosynthesis in the plant so as to increase fermentable carbohydrates. More particularly, the methods described herein are used to downregulate at least a first lignin biosynthesis gene selected from the group consisting of 4-coumarate 3-hydroxylase (C3H), phenylalanine ammonia-lyase (PAL), cinnamate 4-hydroxylase (C4H), hydroxycinnamoyl transferase (HCT), caffeic acid O-methyltransferase (COMT), caffeoyl CoA 3-O-methyltransferase (CCoAOMT), ferulate 5-hydroxylase (F5H), cinnamyl alcohol dehydrogenase (CAD), cinnamoyl CoA-reductase (CCR), 4-coumarate-CoA ligase (4CL), monolignol-lignin-specific glycosyltransferase, and aldehyde dehydrogenase (ALDH) as disclosed in WO 2008064289 A2.

[1046] In particular embodiments, the methods described herein are used to produce plant mass that produces lower levels of acetic acid during fermentation (see also WO 2010096488). More particularly, the methods disclosed herein are used to generate mutations in homologs to Cas1L to reduce polysaccharide acetylation.

### Modifying Yeast for Biofuel Production

[1047] In particular embodiments, the AD-functionalized CRISPR system provided herein is used for bioethanol production by recombinant micro-organisms. For instance, the AD-functionalized CRISPR system can be used to engineer micro-organisms, such as yeast, to generate biofuel or biopolymers from fermentable sugars and optionally to be able to degrade plant-derived lignocellulose derived from agricultural waste as a source of fermentable sugars. In some embodiments, the AD-functionalized CRISPR system is used to modify endogenous metabolic pathways which compete with the biofuel production pathway.

[1048] Accordingly, in more particular embodiments, the methods described herein are used to modify a micro-organism as follows: to modify at least one nucleic acid encoding for an enzyme in a metabolic pathway in said host cell, wherein said pathway produces a metabolite other than acetaldehyde from pyruvate or ethanol from acetaldehyde, and wherein said modification results in a reduced production of said metabolite, or to introduce at least one nucleic acid encoding for an inhibitor of said enzyme.

### Modifying Algae and Plants for Production of Vegetable Oils or Biofuels

[1049] Transgenic algae or other plants such as rape may be particularly useful in the production of vegetable oils or biofuels such as alcohols (especially methanol and ethanol), for instance. These may be engineered to express or overexpress high levels of oil or alcohols for use in the oil or biofuel industries.

[1050] According to particular embodiments of the invention, the AD-functionalized CRISPR system is used to generate lipid-rich diatoms which are useful in biofuel production.

[1051] In particular embodiments it is envisaged to specifically modify genes that are involved in the modification of the quantity of lipids and/or the quality of the lipids produced by the algal cell. Examples of genes encoding enzymes involved in the pathways of fatty acid synthesis can encode proteins having for instance acetyl-CoA carboxylase, fatty acid synthase, 3-ketoacyl_acyl-carrier protein synthase III, glycerol-3-phospate deshydrogenase (G3PDH), Enoyl-acyl carrier protein reductase (Enoyl-ACP-reductase), glycerol-3-phosphate acyltransferase, lysophosphatidic acyl transferase or diacylglycerol acyltransferase, phospholipid:diacylglycerol acyltransferase, phoshatidate phosphatase, fatty acid thioesterase such as palmitoyi protein thioesterase, or malic enzyme activities. In further embodiments it is envisaged to generate diatoms that have increased lipid accumulation. This can be achieved by targeting genes that decrease lipid catabolisation. Of particular interest for use in the methods of the present invention are genes involved in the activation of both triacylglycerol and free fatty acids, as well as genes directly involved in β-oxidation of fatty acids, such as acyl-CoA synthetase, 3-ketoacyl-CoA thiolase, acyl-CoA oxidase activity and phosphoglucomutase. The AD-functionalized CRISPR system and methods described herein can be used to specifically activate such genes in diatoms as to increase their lipid content.

[1052] Organisms such as microalgae are widely used for synthetic biology. Stovicek et al. (Metab. Eng. Comm., 2015; 2:13 describes genome editing of industrial yeast, for example, Saccharomyces cerevisae, to efficiently produce robust strains for industrial production. Stovicek used a CRISPR-Cas9 system codon-optimized for yeast to simultaneously disrupt both alleles of an endogenous gene and knock in a heterologous gene. Cas9 and guide RNA were expressed from genomic or episomal 2μ-based vector locations. The authors also showed that gene disruption efficiency could be improved by optimization of the levels of Cas9 and guide RNA expression. Hlavova et al. (Biotechnol. Adv. 2015) discusses development of species or strains of microalgae using techniques such as CRISPR to target nuclear and chloroplast genes for insertional mutagenesis and screening.

[1053] U.S. Pat. No. 8,945,839 describes a method for engineering Micro-Algae (Chlamydomonas reinhardtii cells) species) using Cas9. Using similar tools, the methods of the AD-functionalized CRISPR system described herein can be applied on Chlamydomonas species and other algae. In particular embodiments, a CRISPR-Cas protein (e.g., Cas13), nucleotide deaminase (which may be fused to the CRISPR-Cas protein or an aptamer-binding adaptor protein), and guide RNA are introduced in algae expressed using a vector that expresses the CRISPR-Cas protein and optionally the nucleotide deaminase under the control of a constitutive promoter such as Hsp70A-Rbc S2 or Beta2-tubulin. Guide RNA will be delivered using a vector containing T7 promoter. Alternatively, mRNA and in vitro transcribed guide RNA can be delivered to algal cells. Electroporation protocol follows standard recommended protocol from the GeneArt Chlamydomonas Engineering kit.

### The Use of AD-Functionalized CRISPR System in the Generation of Micro-Organisms Capable of Fatty Acid Production

[1054] In particular embodiments, the methods of the invention are used for the generation of genetically engineered micro-organisms capable of the production of fatty esters, such as fatty acid methyl esters (“FAME”) and fatty acid ethyl esters (“FAEE”),

[1055] Typically, host cells can be engineered to produce fatty esters from a carbon source, such as an alcohol, present in the medium, by expression or overexpression of a gene encoding a thioesterase, a gene encoding an acyl-CoA synthase, and a gene encoding an ester synthase. Accordingly, the methods provided herein are used to modify a micro-organisms so as to overexpress or introduce a thioesterase gene, a gene encloding an acyl-CoA synthase, and a gene encoding an ester synthase. In particular embodiments, the thioesterase gene is selected from tesA, ‘tesA, tesB,fatB, fatB2,fatB3,fatAl, or fatA. In particular embodiments, the gene encoding an acyl-CoA synthase is selected from fadDJadK, BH3103, pfl-4354, EAV15023, fadD1, fadD2, RPC 4074,fadDD35, fadDD22, faa39, or an identified gene encoding an enzyme having the same properties. In particular embodiments, the gene encoding an ester synthase is a gene encoding a synthase/acyl-CoA:diacylglycerl acyltransferase from Simmondsia chinensis, Acinetobacter sp. ADP, Alcanivorax borkumensis, Pseudomonas aeruginosa, Fundibacter jadensis, Araidopsis thaliana, or Alkaligenes eutrophus, or a variant thereof. Additionally or alternatively, the methods provided herein are used to decrease expression in said micro-organism of of at least one of a gene encoding an acyl-CoA dehydrogenase, a gene encoding an outer membrane protein receptor, and a gene encoding a transcriptional regulator of fatty acid biosynthesis. In particular embodiments one or more of these genes is inactivated, such as by introduction of a mutation. In particular embodiments, the gene encoding an acyl-CoA dehydrogenase is fadE. In particular embodiments, the gene encoding a transcriptional regulator of fatty acid biosynthesis encodes a DNA transcription repressor, for example, fabR.

[1056] Additionally or alternatively, said micro-organism is modified to reduce expression of at least one of a gene encoding a pyruvate formate lyase, a gene encoding a lactate dehydrogenase, or both. In particular embodiments, the gene encoding a pyruvate formate lyase is pflB. In particular embodiments, the gene encoding a lactate dehydrogenase is IdhA. In particular embodiments one or more of these genes is inactivated, such as by introduction of a mutation therein.

[1057] In particular embodiments, the micro-organism is selected from the genus Escherichia, Bacillus, Lactobacillus, Rhodococcus, Synechococcus, Synechoystis, Pseudomonas, Aspergillus, Trichoderma, Neurospora, Fusarium, Humicola, Rhizomucor, Kluyveromyces, Pichia, Mucor, Myceliophtora, Penicillium, Phanerochaete, Pleurotus, Trametes, Chrysosporium, Saccharomyces, Stenotrophamonas, Schizosaccharomyces, Yarrowia, or Streptomyces.

### The Use of AD-Functionalized CRISPR System in the Generation of Micro-Organisms Capable of Organic Acid Production

[1058] The methods provided herein are further used to engineer micro-organisms capable of organic acid production, more particularly from pentose or hexose sugars. In particular embodiments, the methods comprise introducing into a micro-organism an exogenous LDH gene. In particular embodiments, the organic acid production in said micro-organisms is additionally or alternatively increased by inactivating endogenous genes encoding proteins involved in an endogenous metabolic pathway which produces a metabolite other than the organic acid of interest and/or wherein the endogenous metabolic pathway consumes the organic acid. In particular embodiments, the modification ensures that the production of the metabolite other than the organic acid of interest is reduced. According to particular embodiments, the methods are used to introduce at least one engineered gene deletion and/or inactivation of an endogenous pathway in which the organic acid is consumed or a gene encoding a product involved in an endogenous pathway which produces a metabolite other than the organic acid of interest. In particular embodiments, the at least one engineered gene deletion or inactivation is in one or more gene encoding an enzyme selected from the group consisting of pyruvate decarboxylase (pdc), fumarate reductase, alcohol dehydrogenase (adh), acetaldehyde dehydrogenase, phosphoenolpyruvate carboxylase (ppc), D-lactate dehydrogenase (d-ldh), L-lactate dehydrogenase (l-ldh), lactate 2-monooxygenase. In further embodiments the at least one engineered gene deletion and/or inactivation is in an endogenous gene encoding pyruvate decarboxylase (pdc).

[1059] In further embodiments, the micro-organism is engineered to produce lactic acid and the at least one engineered gene deletion and/or inactivation is in an endogenous gene encoding lactate dehydrogenase. Additionally or alternatively, the micro-organism comprises at least one engineered gene deletion or inactivation of an endogenous gene encoding a cytochrome-dependent lactate dehydrogenase, such as a cytochrome B2-dependent L-lactate dehydrogenase.

### The Use of AD-Functionalized CRISPR System in the Generation of Improved Xylose or Cellobiose Utilizing Yeasts Strains

[1060] In particular embodiments, the AD-functionalized CRISPR system may be applied to select for improved xylose or cellobiose utilizing yeast strains. Error-prone PCR can be used to amplify one (or more) genes involved in the xylose utilization or cellobiose utilization pathways. Examples of genes involved in xylose utilization pathways and cellobiose utilization pathways may include, without limitation, those described in Ha, S.J., et al. (2011) Proc. Natl. Acad. Sci. USA 108(2):504-9 and Galazka, J. M., et al. (2010) Science 330(6000):84-6. Resulting libraries of double-stranded DNA molecules, each comprising a random mutation in such a selected gene could be co-transformed with the components of the AD-functionalized CRISPR system into a yeast strain (for instance S288C) and strains can be selected with enhanced xylose or cellobiose utilization capacity, as described in WO2015138855.

[1061] The use of AD-functionalized CRISPR system in the generation of improved yeasts strains for use in isoprenoid biosynthesis

[1062] Tadas Jakočiūnas et al. described the successful application of a multiplex CRISPR-Cas9 system for genome engineering of up to 5 different genomic loci in one transformation step in baker's yeast Saccharomyces cerevisiae (Metabolic Engineering Volume 28, March 2015, Pages 213-222) resulting in strains with high mevalonate production, a key intermediate for the industrially important isoprenoid biosynthesis pathway. In particular embodiments, the AD-functionalized CRISPR system may be applied in a multiplex genome engineering method as described herein for identifying additional high producing yeast strains for use in isoprenoid synthesis.

### Improved Plants and Yeast Cells

[1063] The present invention also provides plants and yeast cells obtainable and obtained by the methods provided herein. The improved plants obtained by the methods described herein may be useful in food or feed production through expression of genes which, for instance ensure tolerance to plant pests, herbicides, drought, low or high temperatures, excessive water, etc.

[1064] The improved plants obtained by the methods described herein, especially crops and algae may be useful in food or feed production through expression of, for instance, higher protein, carbohydrate, nutrient or vitamin levels than would normally be seen in the wildtype. In this regard, improved plants, especially pulses and tubers are preferred.

[1065] Improved algae or other plants such as rape may be particularly useful in the production of vegetable oils or biofuels such as alcohols (especially methanol and ethanol), for instance. These may be engineered to express or overexpress high levels of oil or alcohols for use in the oil or biofuel industries.

[1066] The invention also provides for improved parts of a plant. Plant parts include, but are not limited to, leaves, stems, roots, tubers, seeds, endosperm, ovule, and pollen. Plant parts as envisaged herein may be viable, nonviable, regeneratable, and/or non-regeneratable.

[1067] It is also encompassed herein to provide plant cells and plants generated according to the methods of the invention. Gametes, seeds, embryos, either zygotic or somatic, progeny or hybrids of plants comprising the genetic modification, which are produced by traditional breeding methods, are also included within the scope of the present invention. Such plants may contain a heterologous or foreign DNA sequence inserted at or instead of a target sequence. Alternatively, such plants may contain only an alteration (mutation, deletion, insertion, substitution) in one or more nucleotides. As such, such plants will only be different from their progenitor plants by the presence of the particular modification.

[1068] Thus, the invention provides a plant, animal or cell, produced by the present methods, or a progeny thereof. The progeny may be a clone of the produced plant or animal, or may result from sexual reproduction by crossing with other individuals of the same species to introgress further desirable traits into their offspring. The cell may be in vivo or ex vivo in the cases of multicellular organisms, particularly animals or plants.

[1069] The methods for genome editing using the AD-functionalized CRISPR system as described herein can be used to confer desired traits on essentially any plant, algae, fungus, yeast, etc. A wide variety of plants, algae, fungus, yeast, etc and plant algae, fungus, yeast cell or tissue systems may be engineered for the desired physiological and agronomic characteristics described herein using the nucleic acid constructs of the present disclosure and the various transformation methods mentioned above.

[1070] In particular embodiments, the methods described herein are used to modify endogenous genes or to modify their expression without the permanent introduction into the genome of the plant, algae, fungus, yeast, etc of any foreign gene, including those encoding CRISPR components, so as to avoid the presence of foreign DNA in the genome of the plant. This can be of interest as the regulatory requirements for non-transgenic plants are less rigorous.

[1071] The methods described herein generally result in the generation of “improved plants, algae, fungi, yeast, etc” in that they have one or more desirable traits compared to the wildtype plant. In particular embodiments, non-transgenic genetically modified plants, algae, fungi, yeast, etc., parts or cells are obtained, in that no exogenous DNA sequence is incorporated into the genome of any of the cells of the plant. In such embodiments, the improved plants, algae, fungi, yeast, etc. are non-transgenic. Where only the modification of an endogenous gene is ensured and no foreign genes are introduced or maintained in the plant, algae, fungi, yeast, etc. genome, the resulting genetically modified crops contain no foreign genes and can thus basically be considered non-transgenic. The different applications of the AD-functionalized CRISPR system for plant, algae, fungi, yeast, etc. genome editing include, but are not limited to: editing of endogenous genes to confer an agricultural trait of interest. Exemplary genes conferring agronomic traits include, but are not limited to genes that confer resistance to pests or diseases; genes involved in plant diseases, such as those listed in WO 2013046247; genes that confer resistance to herbicides, fungicides, or the like; genes involved in (abiotic) stress tolerance. Other aspects of the use of the CRISPR-Cas system include, but are not limited to: create (male) sterile plants; increasing the fertility stage in plants/algae etc; generate genetic variation in a crop of interest; affect fruit-ripening; increasing storage life of plants/algae etc; reducing allergen in plants/algae etc; ensure a value added trait (e.g. nutritional improvement); Screening methods for endogenous genes of interest; biofuel, fatty acid, organic acid, etc production.

### AD-Functionalized CRISPR System can be Used in Non-Human Animals

[1072] In an aspect, the invention provides a non-human eukaryotic organism; preferably a multicellular eukaryotic organism, comprising a eukaryotic host cell according to any of the described embodiments. In other aspects, the invention provides a eukaryotic organism; preferably a multicellular eukaryotic organism, comprising a eukaryotic host cell according to any of the described embodiments. The organism in some embodiments of these aspects may be an animal; for example a mammal. Also, the organism may be an arthropod such as an insect. The present invention may also be extended to other agricultural applications such as, for example, farm and production animals. For example, pigs have many features that make them attractive as biomedical models, especially in regenerative medicine. In particular, pigs with severe combined immunodeficiency (SCID) may provide useful models for regenerative medicine, xenotransplantation (discussed also elsewhere herein), and tumor development and will aid in developing therapies for human SCID patients. Lee et al., (Proc Natl Acad Sci USA. 2014 May 20; 111(20):7260-5) utilized a reporter-guided transcription activator-like effector nuclease (TALEN) system to generated targeted modifications of recombination activating gene (RAG) 2 in somatic cells at high efficiency, including some that affected both alleles. The AD-functionalized CRISPR system may be applied to a similar system.

[1073] The methods of Lee et al., (Proc Natl Acad Sci USA. 2014 May 20; 111(20):7260-5) may be applied to the present invention analogously as follows. Mutated pigs are produced by targeted modification of RAG2 in fetal fibroblast cells followed by SCNT and embryo transfer. Constructs coding for CRISPR Cas and a reporter are electroporated into fetal-derived fibroblast cells. After 48 h, transfected cells expressing the green fluorescent protein are sorted into individual wells of a 96-well plate at an estimated dilution of a single cell per well. Targeted modification of RAG2 are screened by amplifying a genomic DNA fragment flanking any CRISPR Cas cutting sites followed by sequencing the PCR products. After screening and ensuring lack of off-site mutations, cells carrying targeted modification of RAG2 are used for SCNT. The polar body, along with a portion of the adjacent cytoplasm of oocyte, presumably containing the metaphase II plate, are removed, and a donor cell are placed in the perivitelline. The reconstructed embryos are then electrically porated to fuse the donor cell with the oocyte and then chemically activated. The activated embryos are incubated in Porcine Zygote Medium 3 (PZM3) with 0.5 Scriptaid (S7817; Sigma-Aldrich) for 14-16 h. Embryos are then washed to remove the Scriptaid and cultured in PZM3 until they were transferred into the oviducts of surrogate pigs.

[1074] The present invention is also applicable to modifying SNPs of other animals, such as cows. Tan et al. (Proc Natl Acad Sci USA. 2013 Oct. 8; 110(41): 16526-16531) expanded the livestock gene editing toolbox to include transcription activator-like (TAL) effector nuclease (TALEN)- and clustered regularly interspaced short palindromic repeats (CRISPR)/Cas9-stimulated homology-directed repair (HDR) using plasmid, rAAV, and oligonucleotide templates. Gene specific guide RNA sequences were cloned into the Church lab guide RNA vector (Addgene ID: 41824) according to their methods (Mali P, et al. (2013) RNA-Guided Human Genome Engineering via Cas9. Science 339(6121):823-826). The Cas9 nuclease was provided either by co-transfection of the hCas9 plasmid (Addgene ID: 41815) or mRNA synthesized from RCIScript-hCas9. This RCIScript-hCas9 was constructed by sub-cloning the XbaI-AgeI fragment from the hCas9 plasmid (encompassing the hCas9 cDNA) into the RCIScript plasmid.

[1075] Heo et al. (Stem Cells Dev. 2015 Feb. 1; 24(3):393-402. doi: 10.1089/scd.2014.0278. Epub 2014 Nov. 3) reported highly efficient gene targeting in the bovine genome using bovine pluripotent cells and clustered regularly interspaced short palindromic repeat (CRISPR)/Cas9 nuclease. First, Heo et al. generate induced pluripotent stem cells (iPSCs) from bovine somatic fibroblasts by the ectopic expression of yamanaka factors and GSK3β and MEK inhibitor (2i) treatment. Heo et al. observed that these bovine iPSCs are highly similar to naïve pluripotent stem cells with regard to gene expression and developmental potential in teratomas. Moreover, CRISPR-Cas9 nuclease, which was specific for the bovine NANOG locus, showed highly efficient editing of the bovine genome in bovine iPSCs and embryos.

[1076] Igenity® provides a profile analysis of animals, such as cows, to perform and transmit traits of economic traits of economic importance, such as carcass composition, carcass quality, maternal and reproductive traits and average daily gain. The analysis of a comprehensive Igenity® profile begins with the discovery of DNA markers (most often single nucleotide polymorphisms or SNPs). All the markers behind the Igenity® profile were discovered by independent scientists at research institutions, including universities, research organizations, and government entities such as USD A. Markers are then analyzed at Igenity® in validation populations. Igenity® uses multiple resource populations that represent various production environments and biological types, often working with industry partners from the seedstock, cow-calf, feedlot and/or packing segments of the beef industry to collect phenotypes that are not commonly available. Cattle genome databases are widely available, see, e.g., the NAGRP Cattle Genome Coordination Program (http://www.animalgenome.org/cattle/maps/db.html). Thus, the present invention maybe applied to target bovine SNPs. One of skill in the art may utilize the above protocols for targeting SNPs and apply them to bovine SNPs as described, for example, by Tan et al. or Heo et al.

[1077] Qingjian Zou et al. (Journal of Molecular Cell Biology Advance Access published Oct. 12, 2015) demonstrated increased muscle mass in dogs by targeting targeting the first exon of the dog Myostatin (MSTN) gene (a negative regulator of skeletal muscle mass). First, the efficiency of the sgRNA was validated, using cotransfection of the the sgRNA targeting MSTN with a Cas9 vector into canine embryonic fibroblasts (CEFs). Thereafter, MSTN KO dogs were generated by micro-injecting embryos with normal morphology with a mixture of Cas9 mRNA and MSTN sgRNA and auto-transplantation of the zygotes into the oviduct of the same female dog. The knock-out puppies displayed an obvious muscular phenotype on thighs compared with its wild-type littermate sister. This can also be performed using the AD-functionalized CRISPR systems provided herein.

### Livestock—Pigs

[1078] Viral targets in livestock may include, in some embodiments, porcine CD163, for example on porcine macrophages. CD163 is associated with infection (thought to be through viral cell entry) by PRRSv (Porcine Reproductive and Respiratory Syndrome virus, an arterivirus). Infection by PRRSv, especially of porcine alveolar macrophages (found in the lung), results in a previously incurable porcine syndrome (“Mystery swine disease” or “blue ear disease”) that causes suffering, including reproductive failure, weight loss and high mortality rates in domestic pigs. Opportunistic infections, such as enzootic pneumonia, meningitis and ear oedema, are often seen due to immune deficiency through loss of macrophage activity. It also has significant economic and environmental repercussions due to increased antibiotic use and financial loss (an estimated $660m per year).

[1079] As reported by Kristin M Whitworth and Dr Randall Prather et al. (Nature Biotech 3434 published online 7 Dec. 2015) at the University of Missouri and in collaboration with Genus Plc, CD163 was targeted using CRISPR-Cas9 and the offspring of edited pigs were resistant when exposed to PRRSv. One founder male and one founder female, both of whom had mutations in exon 7 of CD163, were bred to produce offspring. The founder male possessed an 11-bp deletion in exon 7 on one allele, which results in a frameshift mutation and missense translation at amino acid 45 in domain 5 and a subsequent premature stop codon at amino acid 64. The other allele had a 2-bp addition in exon 7 and a 377-bp deletion in the preceding intron, which were predicted to result in the expression of the first 49 amino acids of domain 5, followed by a premature stop code at amino acid 85. The sow had a 7 bp addition in one allele that when translated was predicted to express the first 48 amino acids of domain 5, followed by a premature stop codon at amino acid 70. The sow's other allele was unamplifiable. Selected offspring were predicted to be a null animal (CD163−/−), i.e. a CD163 knock out.

[1080] Accordingly, in some embodiments, porcine alveolar macrophages may be targeted by the CRISPR protein. In some embodiments, porcine CD163 may be targeted by the CRISPR protein. In some embodiments, porcine CD163 may be knocked out through induction of a DSB or through insertions or deletions, for example targeting deletion or modification of exon 7, including one or more of those described above, or in other regions of the gene, for example deletion or modification of exon 5.

[1081] An edited pig and its progeny are also envisaged, for example a CD163 knock out pig. This may be for livestock, breeding or modelling purposes (i.e. a porcine model). Semen comprising the gene knock out is also provided.

[1082] CD163 is a member of the scavenger receptor cysteine-rich (SRCR) superfamily. Based on in vitro studies SRCR domain 5 of the protein is the domain responsible for unpackaging and release of the viral genome. As such, other members of the SRCR superfamily may also be targeted in order to assess resistance to other viruses. PRRSV is also a member of the mammalian arterivirus group, which also includes murine lactate dehydrogenase-elevating virus, simian hemorrhagic fever virus and equine arteritis virus. The arteriviruses share important pathogenesis properties, including macrophage tropism and the capacity to cause both severe disease and persistent infection. Accordingly, arteriviruses, and in particular murine lactate dehydrogenase-elevating virus, simian hemorrhagic fever virus and equine arteritis virus, may be targeted, for example through porcine CD163 or homologues thereof in other species, and murine, simian and equine models and knockout also provided.

[1083] Indeed, this approach may be extended to viruses or bacteria that cause other livestock diseases that may be transmitted to humans, such as Swine Influenza Virus (SIV) strains which include influenza C and the subtypes of influenza A known as H1N1, H1N2, H2N1, H3N1, H3N2, and H2N3, as well as pneumonia, meningitis and oedema mentioned above.

[1084] In some embodiments, the AD-functionalized CRISPR system described herein can be used to genetically modify a pig genome to inactivate one or more porcine endogenous retrovirus (PERVs) loci to facilitate clinical application of porcine-to-human xenotransplantation. See Yang et al., Science 350(6264):1101-1104 (2015), which is incorporated herein by reference in its entirety. In some embodiments, the AD-functionalized CRISPR system described herein can be used to produce a genetically modified pig that does not comprise any active porcine endogenous retrovirus (PERVs) locus.

[1085] The invention is further described in the following examples, which do not limit the scope of the invention described in the claims.

### EXAMPLES

### Example 1

[1086] Adenine deaminases (ADs) is capable of deaminating adenines at specific sites in double stranded RNA.

[1087] The facts that some ADs can effect adenine deamination on DNA-RNAn RNA duplexes (e.g. Zheng et al., Nucleic Acids Research 2017) presents a unique opportunity to develop an RNA guided AD by taking advantage of the RNA duplex formed between the guide RNA and its complementary DNA target in the R-loop formed during RNA-guided DNA binding by inactive Cas13. By using inactive Cas13 to recruit an AD, the AD enzyme will then act on the adenine in the RNA-DNAn RNA duplex.

[1088] In one embodiment, an inactive Cas13, such as Cas13b is obtained using the following mutations: R116A, H121A, R1177A and H1182A. To increase the efficiency of editing by AD, a mutated ADAR is used such as the mutated hADAR2d comprising mutation E488Q.

### Designs for the Recruitment of AD to a Specific Locus:

[1089] 1. NLS-tagged inactive Cas13 is fused to AD on either the N- or C-terminal end. A variety of linkers are used including flexible linkers such as GSG5 or less flexible linkers such as LEPGEKPYKCPECGKSFSQSGALTRHQRTHTR (SEQ ID No. 11).

[1090] 2. The guide RNA scaffold is modified with aptamers such as MS2 binding sites (e.g. Konermann et al., Nature 2015). NLS-tagged AD-MS2 binding protein fusions is co-introduced into target cells along with (NLS-tagged inactive or Cas13b) and corresponding guide RNA.

[1091] 3. AD is inserted into an internal loop of NLS-tagged inactive or nickase Cas13.

### Designs for the RNA Guide:

[1092] 1. Guide sequences of a length corresponding to that of a natural guide sequence of the Cas13 protein are designed to target the RNA of interest.

[1093] 2. RNA guide with longer than canonical length is used to form RNA duplexes outside of the protein-guide RNA-target DNA complex.

[1094] For each of these RNA guide designs, the base on the RNA that is opposite of the adenine on the target RNA strand would be specified as a C as opposed to U.

### Choice and Designs of ADs:

[1095] A number of ADs are used, and each will have varying levels of activity. These ADs

[1096] 1. Human ADARs (hADAR1, hADAR2, hADAR3)

[1097] 2. Squid Octopus vulgaris ADARs

[1098] 3. Squid Sepia ADARS; Doryteusthis opalescens ADARS

[1099] ADATs (human ADAT, Drosophila ADAT)

[1100] Mutations can also be used to increase the activity of ADAR reacting against a DNA-RNAn RNA duplex. For example, for the human ADAR genes, the hADAR1d(E1008Q) or hADAR2d(E488Q) mutation is used to increase their activity against a DNA-RNA target.

[1101] Each ADAR has varying levels of sequence context requirement. For example, for hADAR1d (E1008Q), tAg and aAg sites are efficiently deaminated, whereas aAt and cAc are less efficiently edited, and gAa and gAc are even less edited. However, the context requirement will vary for different ADARs.

[1102] A schematic showing of one version of the system is provided in FIG. 1. The amino acid sequences of example AD proteins are provided in FIG. 4.

[1103] The embodiments, illustratively described herein may suitably be practiced in the absence of any element or elements, limitation or limitations, not specifically disclosed herein. Thus, for example, the terms “comprising,” “including,” “containing,” etc. shall be read expansively and without limitation. Additionally, the terms and expressions employed herein have been used as terms of description and not of limitation, and there is no intention in the use of such terms and expressions of excluding any equivalents of the features shown and described or portions thereof, but it is recognized that various modifications are possible within the scope of the claimed technology. Additionally, the phrase “consisting essentially of” will be understood to include those elements specifically recited and those additional elements that do not materially affect the basic and novel characteristics of the claimed technology. The phrase “consisting of” excludes any element not specified.

[1104] The present disclosure is not to be limited in terms of the particular embodiments described in this application. Many modifications and variations can be made without departing from its spirit and scope, as will be apparent to those skilled in the art. Functionally equivalent methods and compositions within the scope of the disclosure, in addition to those enumerated herein, will be apparent to those skilled in the art from the foregoing descriptions. Such modifications and variations are intended to fall within the scope of the appended claims. The present disclosure is to be limited only by the terms of the appended claims, along with the full scope of equivalents to which such claims are entitled. It is to be understood that this disclosure is not limited to particular methods, reagents, compounds compositions or biological systems, which can of course vary. It is also to be understood that the terminology used herein is for the purpose of describing particular embodiments only, and is not intended to be limiting.

[1105] In addition, where features or aspects of the disclosure are described in terms of Markush groups, those skilled in the art will recognize that the disclosure is also thereby described in terms of any individual member or subgroup of members of the Markush group.

[1106] As will be understood by one skilled in the art, for any and all purposes, particularly in terms of providing a written description, all ranges disclosed herein also encompass any and all possible subranges and combinations of subranges thereof. Any listed range can be easily recognized as sufficiently describing and enabling the same range being broken down into at least equal halves, thirds, quarters, fifths, tenths, etc. As a non-limiting example, each range discussed herein can be readily broken down into a lower third, middle third and upper third, etc. As will also be understood by one skilled in the art all language such as “up to,” “at least,” “greater than,” “less than,” and the like, include the number recited and refer to ranges which can be subsequently broken down into subranges as discussed above. Finally, as will be understood by one skilled in the art, a range includes each individual member.

[1107] All publications, patent applications, issued patents, and other documents referred to in this specification are herein incorporated by reference as if each individual publication, patent application, issued patent, or other document was specifically and individually indicated to be incorporated by reference in its entirety. Definitions that are contained in text incorporated by reference are excluded to the extent that they contradict definitions in this disclosure.

### Example 2

### Cluc/Gluc Tiling for Cas13a/Cas13b Interference

[1108] To compare knockdown efficiency between Cas13a and Cas13b, Cypridina and Gaussia luciferase genes were tiled with 24 or 96 guides, respectively (FIGS. 10A-10C). Guides were matched for Cas13a and Cas13b, and show increased knockdown efficiency for Cas13b, with all but one guide for each gene showing higher efficiency for Cas13b.

### ADAR Editing Quantification by NGS

[1109] Cas13b-ADAR2 RNA editing efficiency was tested by designing a luciferase reporter with a premature stop codon UAG, which prevents expression of the luciferase (FIG. 11A). 7 guides of varying length were designed and positioned relative to the UAG stop codon that all contained a C mismatch to the A in the UAG. The C mismatch is known to create a bubble at the site of editing which is favored by the ADAR catalytic domain. RNA editing by Cas13b-ADAR2 would convert the UAG to a UIG (UGG), which introduces a tryptophan instead of the stop codon, and allows translation to proceed. Expression of the guides and Cas13b12-ADAR2 fusion in HEK293FT cells restored luciferase expression to varying levels with the greatest restoration occurring for guide 5 (FIG. 11B). In general, there is increasing levels of editing from guides 1-5 as the editing site is moved further away from the 3′ end of the crRNA where the direct repeat is and thus where the protein binds. This likely indicates that the part of the crRNA:target duplex that is bound by the protein is inaccessible to the ADAR catalytic domain. Guides 5, 6, and 7 show the greatest amount of activity because the editing site is on the far end of the guide away from the DR/protein binding area and because their guides are much longer, generating a longer RNA duplex that is favored by ADAR. ADAR activity is optimal when the editing site is in the middle of a RNA duplex. The relative expression of luciferase activity is normalized to the non-targeting guide condition.

[1110] These samples were sequenced to precisely quantitate the RNA editing efficiency (FIG. 11C). The editing efficiency is listed in parentheses next to the guide label. Overall, the percent editing identified by sequencing matched the relative levels of luciferase expression restoration seen in FIG. 11B. Guide 5 showed the most RNA editing with a rate of 45% conversion to G at the on-target A. In some instances, there is a small amount of off-target A-G editing in the region. These may be reduced by introducing G mismatches in the guide sequence, which are disfavored by the ADAR catalytic domain.

[1111] In addition to editing the luciferase reporter transcript, guides were designed to edit out-of-frame UAG sites in the KRAS and PPIB transcripts, with two guides targeting each transcript (FIG. 12). The guides were designed with the same principles as guide 5 above (a 45 nt spacer with the editing site 27 nt away from the 3′ DR and a C mismatch to the editing site adenosine). The KRAS guides were able to achieve 6.5% and 13.7% editing at the on-target adenosine and the PPIB guides were able to achieve 7.7% and 9.2% editing. There are also some off-targets present for some of these guides which can be reduced by designing G mismatches in the spacers against possible off-target adenosines that are nearby. It does seem that off-targets seem to happen with the duplex region 3′ of the target adenosine.

Cas13a/b+shRNA Specificity from RNA Seq

[1112] To determine the specificity of the Cas13b12 knockdown, RNA sequencing was performed on all mRNAs across the transcriptome (FIG. 13A). The knockdown of guides targeting Gluc and KRAS was compared against non-targeting guides and found that Cas13a2 and Cas13b12 had specific knockdown of the target transcript (red dot in FIG. 13A) while the shRNAs had many off-targets as evidenced by the greater variance in the distribution. The number of significant off-targets for each of these conditions is shown in FIG. 13B. Significant off-targets are measured by a t-test with FDR correction (p<0.01) for any off-target transcripts that are changed by greater than 2 fold or less than 0.8 fold. The Cas13a and Cas13b conditions had very few off targets compared to the hundreds of off-targets found for the shRNA conditions. The knockdown efficiency for each of the conditions is shown in FIG. 13C.

### Mismatch Specificity to Reduce Off Targets (A:A or A:G)

[1113] To reduce off targets at adenosines near the target adenosine editing site, guides were designed that have G or A mismatches to the potential off-target adenosines (FIG. 14 and Table below). Mismatches with G or A are not favored for activity by the ADAR catalytic domain.

| Name | Guide |
|---|---|
| Luciferase guide WT | catagaatgttctaaaCCAtcctg |
| with C mismatch | cggcctctactctgcattcaa |
| (SEQ ID No. 162) | |
| Luciferase guide WT | catagaatgttcGaaaCCAtcctg |
| with C mismatch | cggcctctactctgcattcaa |
| with 1 G MM | |
| (SEQ ID No. 163) | |
| Luciferase guide WT | catagaatgGtcGaaaCCAtcctg |
| with C mismatch | cggcctctactctgcattcaa |
| with 2 G MM | |
| (SEQ ID No. 164) | |
| Luciferase guide WT | catagaatgttcAaaaCCAtcctg |
| with C mismatch | cggcctctactctgcattcaa |
| with 1 G MM | |
| (SEQ ID No. 165) | |
| Luciferase guide WT | catagaatgAtcAaaaCCAtcctg |
| with C mismatch | cggcctctactctgcattcaa |
| with 2 G MM | |
| (SEQ ID No. 166) | |
| KRAS guide WT with | ggtttctccatcaattacCacttg |
| C mismatch | cttcctgtaggaatcctctatt |
| (SEQ ID No. 167) | |
| KRAS guide with C | ggtttctccatcaatGacCacttg |
| mismatch with 1 G | cttcctgtaggaatcctctatt |
| MM | |
| (SEQ ID No. 168) | |
| KRAS guide with C | ggtttctccatcaaGGacCacttg |
| mismatch with 2 G | cttcctgtaggaatcctctatt |
| MM | |
| (SEQ ID No. 169) | |
| KRAS guide with C | ggtttctccatcaatAacCacttg |
| mismatch with 1 A | cttcctgtaggaatcctctatt |
| MM | |
| (SEQ ID No. 170) | |
| KRAS guide with C | ggtttctccatcaaAAacCacttg |
| mismatch with 2 A | cttcctgtaggaatcctctatt |
| MM | |
| (SEQ ID No. 171) | |
| PPIB guide WT with | gcctttctctcctgtagcCaaggc |
| C mismatch | cacaaaattatccactgttttt |
| (SEQ ID No. 172) | |
| PPIB guide WT with | gcctttctctcctgGagcCaaggc |
| C mismatch with 1 | cacaaaattatccactgttttt |
| G MM | |
| (SEQ ID No. 173) | |
| PPIB guide WT with | gcctttctctcctgAagcCaaggc |
| C mismatch with 1 | cacaaaattatccactgttttt |
| A MM | |
| (SEQ ID No. 174) | |

[1114] The guides in the Table above were designed to have a C mismatch against the on-target adenosine to be edited and G or A mismatches against known off-target sites (based off of the RNA sequencing from above). Mismatches in the spacer sequence are capitalized.

### Mismatch for On-Target Activity

[1115] Prior research on the catalytic domain of ADAR2 has demonstrated that different bases opposite the target A can influence the amount of inosine editing (Zheng et al. (2017), Nucleic Acid Research, 45(6):3369-3377). Specifically, U and C are found opposite natural ADAR-edited A's, whereas G and A are not. To test whether or not A and G mismatches with the edited A can be used to suppress ADAR activity a guide known to be active with a C mismatch is tested with all other 3 possible bases on the luciferase reporter assay (FIG. 16). Relative activities are quantified by assessing luciferase activity. Guide sequences are provided in the Table below.

| Mismatch | Guide_sequence |
|---|---|
| Mismatch-C | GcatagaatgttctaaaCCAtcctgcggcctc |
| (SEQ ID | tactctgcattcaa |
| No. 175) | |
| Mismatch-G | GcatagaatgttctaaaCGAtcctgcggcctc |
| (SEQ ID | tactctgcattcaa |
| No. 176) | |
| Mismatch-T | GcatagaatgttctaaaCTAtcctgcggcctc |
| (SEQ ID | tactctgcattcaa |
| No. 177) | |
| Mismatch-A | GcatagaatgttctaaaCAAtcctgcggcctc |
| (SEQ ID | tactctgcattcaa |
| No. 178) | |

Improvement of Editing and Reduction of Off-Target Modification by Chemical Modification of gRNAs

[1116] gRNAs which are chemically modified as exemplified in Vogel et al. (2014), Angew Chem Int Ed, 53:6267-6271, doi:10.1002/anie.201402634) to reduce off-target activity and to improve on-target efficiency. 2′-O-methyl and phosphothioate modified guide RNAs in general improve editing efficiency in cells.

### Motif Preference

[1117] ADAR has been known to demonstrate a preference for neighboring nucleotides on either side of the edited A (www.nature.com/nsmb/journal/v23/n5/full/nsmb.3203.html, Matthews et al. (2017), Nature Structural Mol Biol, 23(5): 426-433). The preference is systematically tested by targeting Cypridina luciferase transcripts with variable bases surrounding the targeted A (FIG. 17).

### Larger Bubbles to Enhance RNA Editing Efficiency

[1118] To enhance RNA editing efficiency on non-preferred 5′ or 3′ neighboring bases, intentional mismatches in neighboring bases are introduced, which has been demonstrated in vitro to allow for editing of non-preferred motifs (https://academic.oup.com/nar/article-lookup/doi/10.1093/nar/gku272; Schneider et al (2014), Nucleic Acid Res, 42(10):e87); Fukuda et al. (2017), Scienticic Reports, 7, doi:10.1038/srep41478). Additional mismatches are tested, such as guanosine substitutions, to see if they reduce natural preferences (FIG. 18).

### Editing of Multiple A's in a Transcript

[1119] Results suggest that As opposite Cs in the targeting window of the ADAR deaminase domain are preferentially edited over other bases. Additionally, As base-paired with Us within a few bases of the targeted base show low levels of editing by Cas13b-ADAR fusions, suggesting that there is flexibility for the enzyme to edit multiple As (FIG. 19). These two observations suggest that multiple As in the activity window of Cas13b-ADAR fusions could be specified for editing by mismatching all As to be edited with Cs. To test this the most promising guides from the optimization experiment are taken and multiple A:C mismatches in the activity window are designed to test the possibility of creating multiple A:I edits. The editing rates for this experiment is be quantified using NGS. To suppress potential off-target editing in the activity window, non-target As are paired with As or Gs (depending on the results from the base preference experiment).

### Guide Length Titration for RNA Editing

[1120] ADAR naturally works on inter- or intra-molecular RNA duplexes of >20 bp in length (see also Nishikura et al. (2010), Annu Rev Biochem, 79:321-349). The results demonstrated that longer crRNAs, resulting in longer duplexes, had higher levels of activity. To systematically compare the activity of guides of different lengths for RNA editing activity we have designed guides of 30, 50, 70 and 84 bases to correct the stop codon in our luciferase reporter assay (FIGS. 20A-20F and Table below). We have designed these guides such that the position of the edited A is present at all possible even distances within the mRNA:crRNA duplex with respect to the 3′ end of the specificity determining region of the crRNA (i.e. +2, +4 etc.).

| Sequence Name | Sequence |
|---|---|
| Guide_Cas13bC- | GCATCCTGCGGCCTCTACTCTGCATTCAATT |
| luc_30_ADAR0To | |
| p | |
| (SEQ ID No. 179) | |
| Guide_Cas13bC- | GACCATCCTGCGGCCTCTACTCTGCATTCAA |
| luc_30_ADAR1To | |
| p | |
| (SEQ ID No. 180) | |
| Guide_Cas13bC- | GAAACCATCCTGCGGCCTCTACTCTGCATTC |
| luc_30_ADAR2To | |
| p | |
| (SEQ ID No. 181) | |
| Guide_Cas13bC- | GCTAAACCATCCTGCGGCCTCTACTCTGCAT |
| luc_30_ADAR3To | |
| p | |
| (SEQ ID No. 182) | |
| Guide_Cas13bC- | GTTCTAAACCATCCTGCGGCCTCTACTCTGC |
| luc_30_ADAR4To | |
| p | |
| (SEQ ID No. 183) | |
| Guide_Cas13bC- | GTGTTCTAAACCATCCTGCGGCCTCTACTCT |
| luc_30_ADAR5To | |
| p | |
| (SEQ ID No. 184) | |
| Guide_Cas13bC- | GAATGTTCTAAACCATCCTGCGGCCTCTACT |
| luc_30_ADAR6To | |
| p | |
| (SEQ ID No. 185) | |
| Guide_Cas13bC- | GAGAATGTTCTAAACCATCCTGCGGCCTCTA |
| luc_30_ADAR7To | |
| p | |
| (SEQ ID No. 186) | |
| Guide_Cas13bC- | GATAGAATGTTCTAAACCATCCTGCGGCCTC |
| luc_30_ADAR8To | |
| p | |
| (SEQ ID No. 187) | |
| Guide_Cas13bC- | GCCATAGAATGTTCTAAACCATCCTGCGGCC |
| luc_30_ADAR9To | |
| p | |
| (SEQ ID No. 188) | |
| Guide_Cas13bC- | GTTCCATAGAATGTTCTAAACCATCCTGCGG |
| luc_30_ADAR10To | |
| p | |
| (SEQ ID No. 189) | |
| Guide_Cas13bC- | GCTTTCCATAGAATGTTCTAAACCATCCTGC |
| luc_30_ADAR11To | |
| p | |
| (SEQ ID No. 190) | |
| Guide_Cas13bC- | GCTCTTTCCATAGAATGTTCTAAACCATCCT |
| luc_30_ADAR12To | |
| p | |
| (SEQ ID No. 191) | |
| Guide_Cas13bC- | GATCTCTTTCCATAGAATGTTCTAAACCATC |
| luc_30_ADAR13To | |
| p | |
| (SEQ ID No. 192) | |
| Guide_Cas13bC- | GGAATCTCTTTCCATAGAATGTTCTAAACCA |
| luc_30_ADAR14To | |
| p | |
| (SEQ ID No. 193) | |
| Guide_Cas13bC- | GCATCCTGCGGCCTCTACTCTGCATTCAATT |
| luc_50_ADAR0To | ACATACTGACACATTCGGCA |
| p | |
| (SEQ ID No. 194) | |
| Guide_Cas13bC- | GACCATCCTGCGGCCTCTACTCTGCATTCAA |
| luc_50_ADAR1To | TTACATACTGACACATTCGG |
| p | |
| (SEQ ID No. 195) | |
| Guide_Cas13bC- | GAAACCATCCTGCGGCCTCTACTCTGCATTC |
| luc_50_ADAR2To | AATTACATACTGACACATTC |
| p | |
| (SEQ ID No. 196) | |
| Guide_Cas13bC- | GCTAAACCATCCTGCGGCCTCTACTCTGCAT |
| luc_50_ADAR3To | TCAATTACATACTGACACAT |
| p | |
| (SEQ ID No. 197) | |
| Guide_Cas13bC- | GTTCTAAACCATCCTGCGGCCTCTACTCTGC |
| luc_50_ADAR4To | ATTCAATTACATACTGACAC |
| p | |
| (SEQ ID No. 198) | |
| Guide_Cas13bC- | GTGTTCTAAACCATCCTGCGGCCTCTACTCT |
| luc_50_ADAR5To | GCATTCAATTACATACTGAC |
| p | |
| (SEQ ID No. 199) | |
| Guide_Cas13bC- | GAATGTTCTAAACCATCCTGCGGCCTCTACT |
| luc_50_ADAR6To | CTGCATTCAATTACATACTG |
| p | |
| (SEQ ID No. 200) | |
| Guide_Cas13bC- | GAGAATGTTCTAAACCATCCTGCGGCCTCTA |
| luc_50_ADAR7To | CTCTGCATTCAATTACATAC |
| p | |
| (SEQ ID No. 201) | |
| Guide_Cas13bC- | GATAGAATGTTCTAAACCATCCTGCGGCCTC |
| luc_50_ADAR8To | TACTCTGCATTCAATTACAT |
| p | |
| (SEQ ID No. 202) | |
| Guide_Cas13bC- | GCCATAGAATGTTCTAAACCATCCTGCGGCC |
| luc_50_ADAR9To | TCTACTCTGCATTCAATTAC |
| p | |
| (SEQ ID No. 203) | |
| Guide_Cas13bC- | GTTCCATAGAATGTTCTAAACCATCCTGCGG |
| luc_50_ADAR10To | CCTCTACTCTGCATTCAATT |
| p | |
| (SEQ ID No. 204) | |
| Guide_Cas13bC- | GCTTTCCATAGAATGTTCTAAACCATCCTGC |
| luc_50_ADAR11To | GGCCTCTACTCTGCATTCAA |
| p | |
| (SEQ ID No. 205) | |
| Guide_Cas13bC- | GCTCTTTCCATAGAATGTTCTAAACCATCCT |
| luc_50_ADAR12To | GCGGCCTCTACTCTGCATTC |
| p | |
| (SEQ ID No. 206) | |
| Guide_Cas13bC- | GATCTCTTTCCATAGAATGTTCTAAACCATC |
| luc_50_ADAR13To | CTGCGGCCTCTACTCTGCAT |
| p | |
| (SEQ ID No. 207) | |
| Guide_Cas13bC- | GGAATCTCTTTCCATAGAATGTTCTAAACCA |
| luc_50_ADAR14To | TCCTGCGGCCTCTACTCTGC |
| p | |
| (SEQ ID No. 208) | |
| Guide_Cas13bC- | GTGGAATCTCTTTCCATAGAATGTTCTAAAC |
| luc_50_ADAR15To | CATCCTGCGGCCTCTACTCT |
| p | |
| (SEQ ID No. 209) | |
| Guide_Cas13bC- | GACTGGAATCTCTTTCCATAGAATGTTCTAA |
| luc_50_ADAR16To | ACCATCCTGCGGCCTCTACT |
| p | |
| (SEQ ID No. 210) | |
| Guide_Cas13bC- | GGAACTGGAATCTCTTTCCATAGAATGTTCT |
| luc_50_ADAR17To | AAACCATCCTGCGGCCTCTA |
| p | |
| (SEQ ID No. 211) | |
| Guide_Cas13bC- | GTGGAACTGGAATCTCTTTCCATAGAATGTT |
| luc_50_ADAR18To | CTAAACCATCCTGCGGCCTC |
| p | |
| (SEQ ID No. 212) | |
| Guide_Cas13bC- | GCCTGGAACTGGAATCTCTTTCCATAGAATG |
| luc_50_ADAR19To | TTCTAAACCATCCTGCGGCC |
| p | |
| (SEQ ID No. 213) | |
| Guide_Cas13bC- | GTTCCTGGAACTGGAATCTCTTTCCATAGAA |
| luc_50_ADAR20To | TGTTCTAAACCATCCTGCGG |
| p | |
| (SEQ ID No. 214) | |
| Guide_Cas13bC- | GGGTTCCTGGAACTGGAATCTCTTTCCATAG |
| luc_50_ADAR21To | AATGTTCTAAACCATCCTGC |
| p | |
| (SEQ ID No. 215) | |
| Guide_Cas13bC- | GCAGGTTCCTGGAACTGGAATCTCTTTCCAT |
| luc_50_ADAR22To | AGAATGTTCTAAACCATCCT |
| p | |
| (SEQ ID No. 216) | |
| Guide_Cas13bC- | GACCAGGTTCCTGGAACTGGAATCTCTTTCC |
| luc_50_ADAR23To | ATAGAATGTTCTAAACCATC |
| p | |
| (SEQ ID No. 217) | |
| Guide_Cas13bC- | GGTACCAGGTTCCTGGAACTGGAATCTCTTT |
| luc_50_ADAR24To | CCATAGAATGTTCTAAACCA |
| p | |
| (SEQ ID No. 218) | |
| Guide_Cas13bC- | GCATCCTGCGGCCTCTACTCTGCATTCAATT |
| luc_70_ ADAR0To | ACATACTGACACATTCGGCAACATGTTTTTC |
| p | CTGGTTTAT |
| (SEQ ID No. 219) | |
| Guide_Cas13bC- | GACCATCCTGCGGCCTCTACTCTGCATTCAA |
| luc_70_ADAR1To | TTACATACTGACACATTCGGCAACATGTTTT |
| p | TCCTGGTTT |
| (SEQ ID No. 220) | |
| Guide_Cas13bC- | GAAACCATCCTGCGGCCTCTACTCTGCATTC |
| luc_70_ADAR2To | AATTACATACTGACACATTCGGCAACATGTT |
| p | TTTCCTGGT |
| (SEQ ID No. 221) | |
| Guide_Cas13bC- | GCTAAACCATCCTGCGGCCTCTACTCTGCAT |
| luc_70_ADAR3To | TCAATTACATACTGACACATTCGGCAACATG |
| p | TTTTTCCTG |
| (SEQ ID No. 222) | |
| Guide_Cas13bC- | GTTCTAAACCATCCTGCGGCCTCTACTCTGC |
| luc_70_ADAR4To | ATTCAATTACATACTGACACATTCGGCAACA |
| p | TGTTTTTCC |
| (SEQ ID No. 223) | |
| Guide_Cas13bC- | GTGTTCTAAACCATCCTGCGGCCTCTACTCT |
| luc_70_ADAR5To | GCATTCAATTACATACTGACACATTCGGCAA |
| p | CATGTTTTT |
| (SEQ ID No. 224) | |
| Guide_Cas13bC- | GAATGTTCTAAACCATCCTGCGGCCTCTACT |
| luc_70_ADAR6To | CTGCATTCAATTACATACTGACACATTCGGC |
| p | AACATGTTT |
| (SEQ ID No. 225) | |
| Guide_Cas13bC- | GAGAATGTTCTAAACCATCCTGCGGCCTCTA |
| luc_70_ADAR7To | CTCTGCATTCAATTACATACTGACACATTCG |
| p | GCAACATGT |
| (SEQ ID No. 226) | |
| Guide_Cas13bC- | GATAGAATGTTCTAAACCATCCTGCGGCCTC |
| luc_70_ADAR8To | TACTCTGCATTCAATTACATACTGACACATT |
| p | CGGCAACAT |
| (SEQ ID No. 227) | |
| Guide_Cas13bC- | GCCATAGAATGTTCTAAACCATCCTGCGGCC |
| luc_70_ADAR9To | TCTACTCTGCATTCAATTACATACTGACACA |
| p | TTCGGCAAC |
| (SEQ ID No. 228) | |
| Guide_Cas13bC- | GTTCCATAGAATGTTCTAAACCATCCTGCGG |
| luc_70_ADAR10To | CCTCTACTCTGCATTCAATTACATACTGACA |
| p | CATTCGGCA |
| (SEQ ID No. 229) | |
| Guide_Cas13bC- | GCTTTCCATAGAATGTTCTAAACCATCCTGC |
| luc_70_ADAR11To | GGCCTCTACTCTGCATTCAATTACATACTGA |
| p | CACATTCGG |
| (SEQ ID No. 230) | |
| Guide_Cas13bC- | GCTCTTTCCATAGAATGTTCTAAACCATCCT |
| luc_70_ADAR12To | GCGGCCTCTACTCTGCATTCAATTACATACT |
| p | GACACATTC |
| (SEQ ID No. 231) | |
| Guide_Cas13bC- | GATCTCTTTCCATAGAATGTTCTAAACCATC |
| luc_70_ADAR13To | CTGCGGCCTCTACTCTGCATTCAATTACATA |
| p | CTGACACAT |
| (SEQ ID No. 232) | |
| Guide_Cas13bC- | GGAATCTCTTTCCATAGAATGTTCTAAACCA |
| luc_70_ADAR14To | TCCTGCGGCCTCTACTCTGCATTCAATTACA |
| p | TACTGACAC |
| (SEQ ID No. 233) | |
| Guide_Cas13bC- | GTGGAATCTCTTTCCATAGAATGTTCTAAAC |
| luc_70_ADAR15To | CATCCTGCGGCCTCTACTCTGCATTCAATTA |
| p | CATACTGAC |
| (SEQ ID No. 234) | |
| Guide_Cas13bC- | GACTGGAATCTCTTTCCATAGAATGTTCTAA |
| luc_70_ADAR16To | ACCATCCTGCGGCCTCTACTCTGCATTCAAT |
| p | TACATACTG |
| (SEQ ID No. 235) | |
| Guide_Cas13bC- | GGAACTGGAATCTCTTTCCATAGAATGTTCT |
| luc_70_ADAR17To | AAACCATCCTGCGGCCTCTACTCTGCATTCA |
| p | ATTACATAC |
| (SEQ ID No. 236) | |
| Guide_Cas13bC- | GTGGAACTGGAATCTCTTTCCATAGAATGTT |
| luc_70_ADAR18To | CTAAACCATCCTGCGGCCTCTACTCTGCATT |
| p | CAATTACAT |
| (SEQ ID No. 237) | |
| Guide_Cas13bC- | GCCTGGAACTGGAATCTCTTTCCATAGAATG |
| luc_70_ADAR19To | TTCTAAACCATCCTGCGGCCTCTACTCTGCA |
| p | TTCAATTAC |
| (SEQ ID No. 238) | |
| Guide_Cas13bC- | GTTCCTGGAACTGGAATCTCTTTCCATAGAA |
| luc_70_ADAR20To | TGTTCTAAACCATCCTGCGGCCTCTACTCTG |
| p | CATTCAATT |
| (SEQ ID No. 239) | |
| Guide_Cas13bC- | GGGTTCCTGGAACTGGAATCTCTTTCCATAG |
| luc_70_ADAR21To | AATGTTCTAAACCATCCTGCGGCCTCTACTC |
| p | TGCATTCAA |
| (SEQ ID No. 240) | |
| Guide_Cas13bC- | GCAGGTTCCTGGAACTGGAATCTCTTTCCAT |
| luc_70_ADAR22To | AGAATGTTCTAAACCATCCTGCGGCCTCTAC |
| p | TCTGCATTC |
| (SEQ ID No. 241) | |
| Guide_Cas13bC- | GACCAGGTTCCTGGAACTGGAATCTCTTTCC |
| luc_70_ADAR23To | ATAGAATGTTCTAAACCATCCTGCGGCCTCT |
| p | ACTCTGCAT |
| (SEQ ID No. 242) | |
| Guide_Cas13bC- | GGTACCAGGTTCCTGGAACTGGAATCTCTTT |
| luc_70_ADAR24To | CCATAGAATGTTCTAAACCATCCTGCGGCCT |
| p | CTACTCTGC |
| (SEQ ID No. 243) | |
| Guide_Cas13bC- | GATGTACCAGGTTCCTGGAACTGGAATCTCT |
| luc_70_ADAR25To | TTCCATAGAATGTTCTAAACCATCCTGCGGC |
| p | CTCTACTCT |
| (SEQ ID No. 244) | |
| Guide_Cas13bC- | GGTATGTACCAGGTTCCTGGAACTGGAATCT |
| luc_70_ADAR26To | CTTTCCATAGAATGTTCTAAACCATCCTGCG |
| p | GCCTCTACT |
| (SEQ ID No. 245) | |
| Guide_Cas13bC- | GACGTATGTACCAGGTTCCTGGAACTGGAAT |
| luc_70_ADAR27To | CTCTTTCCATAGAATGTTCTAAACCATCCTG |
| p | CGGCCTCTA |
| (SEQ ID No. 246) | |
| Guide_Cas13bC- | GACACGTATGTACCAGGTTCCTGGAACTGGA |
| luc_70_ADAR28To | ATCTCTTTCCATAGAATGTTCTAAACCATCC |
| p | TGCGGCCTC |
| (SEQ ID No. 247) | |
| Guide_Cas13bC- | GCAACACGTATGTACCAGGTTCCTGGAACTG |
| luc_70_ADAR29To | GAATCTCTTTCCATAGAATGTTCTAAACCAT |
| p | CCTGCGGCC |
| (SEQ ID No. 248) | |
| Guide_Cas13bC- | GCCCAACACGTATGTACCAGGTTCCTGGAAC |
| luc_70_ADAR30To | TGGAATCTCTTTCCATAGAATGTTCTAAACC |
| p | ATCCTGCGG |
| (SEQ ID No. 249) | |
| Guide_Cas13bC- | GGACCCAACACGTATGTACCAGGTTCCTGGA |
| luc_70_ADAR31To | ACTGGAATCTCTTTCCATAGAATGTTCTAAA |
| p | CCATCCTGC |
| (SEQ ID No. 250) | |
| Guide_Cas13bC- | GTTGACCCAACACGTATGTACCAGGTTCCTG |
| luc_70_ADAR32To | GAACTGGAATCTCTTTCCATAGAATGTTCTA |
| p | AACCATCCT |
| (SEQ ID No. 251) | |
| Guide_Cas13bC- | GCCTTGACCCAACACGTATGTACCAGGTTCC |
| luc_70_ADAR33To | TGGAACTGGAATCTCTTTCCATAGAATGTTC |
| p | TAAACCATC |
| (SEQ ID No. 252) | |
| Guide_Cas13bC- | GTTCCTTGACCCAACACGTATGTACCAGGTT |
| luc_70_ADAR34To | CCTGGAACTGGAATCTCTTTCCATAGAATGT |
| p | TCTAAACCA |
| (SEQ ID No. 253) | |
| Guide_Cas13bC- | GCATCCTGCGGCCTCTACTCTGCATTCAATT |
| luc_84_ADAR0To | ACATACTGACACATTCGGCAACATGTTTTTC |
| p | CTGGTTTATTTTCACACAGTCCA |
| (SEQ ID No. 254) | |
| Guide_Cas13bC- | GACCATCCTGCGGCCTCTACTCTGCATTCAA |
| luc_84_ADAR1To | TTACATACTGACACATTCGGCAACATGTTTT |
| p | TCCTGGTTTATTTTCACACAGTC |
| (SEQ ID No. 255) | |
| Guide_Cas13bC- | GAAACCATCCTGCGGCCTCTACTCTGCATTC |
| luc_84_ADAR2To | AATTACATACTGACACATTCGGCAACATGTT |
| p | TTTCCTGGTTTATTTTCACACAG |
| (SEQ ID No. 256) | |
| Guide_Cas13bC- | GCTAAACCATCCTGCGGCCTCTACTCTGCAT |
| luc_84_ADAR3To | TCAATTACATACTGACACATTCGGCAACATG |
| p | TTTTTCCTGGTTTATTTTCACAC |
| (SEQ ID No. 257) | |
| Guide_Cas13bC- | GTTCTAAACCATCCTGCGGCCTCTACTCTGC |
| luc_84_ADAR4To | ATTCAATTACATACTGACACATTCGGCAACA |
| p | TGTTTTTCCTGGTTTATTTTCAC |
| (SEQ ID No. 258) | |
| Guide_Cas13bC- | GTGTTCTAAACCATCCTGCGGCCTCTACTCT |
| luc_84_ADAR5To | GCATTCAATTACATACTGACACATTCGGCAA |
| p | CATGTTTTTCCTGGTTTATTTTC |
| (SEQ ID No. 259) | |
| Guide_Cas13bC- | GAATGTTCTAAACCATCCTGCGGCCTCTACT |
| luc_84_ADAR6To | CTGCATTCAATTACATACTGACACATTCGGC |
| p | AACATGTTTTTCCTGGTTTATTT |
| (SEQ ID No. 260) | |
| Guide_Cas13bC- | GAGAATGTTCTAAACCATCCTGCGGCCTCTA |
| luc_84_ADAR7To | CTCTGCATTCAATTACATACTGACACATTCG |
| p | GCAACATGTTTTTCCTGGTTTAT |
| (SEQ ID No. 261) | |
| Guide_Cas13bC- | GATAGAATGTTCTAAACCATCCTGCGGCCTC |
| luc_84_ADAR8To | TACTCTGCATTCAATTACATACTGACACATT |
| p | CGGCAACATGTTTTTCCTGGTTT |
| (SEQ ID No. 262) | |
| Guide_Cas13bC- | GCCATAGAATGTTCTAAACCATCCTGCGGCC |
| luc_84_ADAR9To | TCTACTCTGCATTCAATTACATACTGACACA |
| p | TTCGGCAACATGTTTTTCCTGGT |
| (SEQ ID No. 263) | |
| Guide_Cas13bC- | GTTCCATAGAATGTTCTAAACCATCCTGCGG |
| luc_84_ADAR10To | CCTCTACTCTGCATTCAATTACATACTGACA |
| p | CATTCGGCAACATGTTTTTCCTG |
| (SEQ ID No. 264) | |
| Guide_Cas13bC- | GCTTTCCATAGAATGTTCTAAACCATCCTGC |
| luc_84_ADAR11To | GGCCTCTACTCTGCATTCAATTACATACTGA |
| p | CACATTCGGCAACATGTTTTTCC |
| (SEQ ID No. 265) | |
| Guide_Cas13bC- | GCTCTTTCCATAGAATGTTCTAAACCATCCT |
| luc_84_ADAR12To | GCGGCCTCTACTCTGCATTCAATTACATACT |
| p | GACACATTCGGCAACATGTTTTT |
| (SEQ ID No. 266) | |
| Guide_Cas13bC- | GATCTCTTTCCATAGAATGTTCTAAACCATC |
| luc_84_ADAR13To | CTGCGGCCTCTACTCTGCATTCAATTACATA |
| p | CTGACACATTCGGCAACATGTTT |
| (SEQ ID No. 267) | |
| Guide_Cas13bC- | GGAATCTCTTTCCATAGAATGTTCTAAACCA |
| luc_84_ADAR14To | TCCTGCGGCCTCTACTCTGCATTCAATTACA |
| p | TACTGACACATTCGGCAACATGT |
| SEQ ID No. 268) | |
| Guide_Cas13bC- | GTGGAATCTCTTTCCATAGAATGTTCTAAAC |
| luc_84_ADAR15To | CATCCTGCGGCCTCTACTCTGCATTCAATTA |
| p | CATACTGACACATTCGGCAACAT |
| (SEQ ID No. 269) | |
| Guide_Cas13bC- | GACTGGAATCTCTTTCCATAGAATGTTCTAA |
| luc_84_ADAR16To | ACCATCCTGCGGCCTCTACTCTGCATTCAAT |
| p | TACATACTGACACATTCGGCAAC |
| (SEQ ID No. 270) | |
| Guide_Cas13bC- | GGAACTGGAATCTCTTTCCATAGAATGTTCT |
| luc_84_ADAR17To | AAACCATCCTGCGGCCTCTACTCTGCATTCA |
| p | ATTACATACTGACACATTCGGCA |
| (SEQ ID No. 271) | |
| Guide_Cas13bC- | GTGGAACTGGAATCTCTTTCCATAGAATGTT |
| luc_84_ADAR18To | CTAAACCATCCTGCGGCCTCTACTCTGCATT |
| p | CAATTACATACTGACACATTCGG |
| (SEQ ID No. 272) | |
| Guide_Cas13bC- | GCCTGGAACTGGAATCTCTTTCCATAGAATG |
| luc_84_ADAR19To | TTCTAAACCATCCTGCGGCCTCTACTCTGCA |
| p | TTCAATTACATACTGACACATTC |
| (SEQ ID No. 273) | |
| Guide_Cas13bC- | GTTCCTGGAACTGGAATCTCTTTCCATAGAA |
| luc_84_ADAR20To | TGTTCTAAACCATCCTGCGGCCTCTACTCTG |
| p | CATTCAATTACATACTGACACAT |
| (SEQ ID No. 274) | |
| Guide_Cas13bC- | GGGTTCCTGGAACTGGAATCTCTTTCCATAG |
| luc_84_ADAR21To | AATGTTCTAAACCATCCTGCGGCCTCTACTC |
| p | TGCATTCAATTACATACTGACAC |
| (SEQ ID No. 275) | |
| Guide_Cas13bC- | GCAGGTTCCTGGAACTGGAATCTCTTTCCAT |
| luc_84_ADAR22To | AGAATGTTCTAAACCATCCTGCGGCCTCTAC |
| p | TCTGCATTCAATTACATACTGAC |
| (SEQ ID No. 276) | |
| Guide_Cas13bC- | GACCAGGTTCCTGGAACTGGAATCTCTTTCC |
| luc_84_ADAR23To | ATAGAATGTTCTAAACCATCCTGCGGCCTCT |
| p | ACTCTGCATTCAATTACATACTG |
| (SEQ ID No. 277) | |
| Guide_Cas13bC- | GGTACCAGGTTCCTGGAACTGGAATCTCTTT |
| luc_84_ADAR24To | CCATAGAATGTTCTAAACCATCCTGCGGCCT |
| p | CTACTCTGCATTCAATTACATAC |
| (SEQ ID No. 278) | |
| Guide_Cas13bC- | GATGTACCAGGTTCCTGGAACTGGAATCTCT |
| luc_84_ADAR25To | TTCCATAGAATGTTCTAAACCATCCTGCGGC |
| p | CTCTACTCTGCATTCAATTACAT |
| (SEQ ID No. 279) | |
| Guide_Cas13bC- | GGTATGTACCAGGTTCCTGGAACTGGAATCT |
| luc_84_ADAR26To | CTTTCCATAGAATGTTCTAAACCATCCTGCG |
| p | GCCTCTACTCTGCATTCAATTAC |
| (SEQ ID No. 280) | |
| Guide_Cas13bC- | GACGTATGTACCAGGTTCCTGGAACTGGAAT |
| luc_84_ADAR27To | CTCTTTCCATAGAATGTTCTAAACCATCCTG |
| p | CGGCCTCTACTCTGCATTCAATT |
| (SEQ ID No. 281) | |
| Guide_Cas13bC- | GACACGTATGTACCAGGTTCCTGGAACTGGA |
| luc_84_ADAR28To | ATCTCTTTCCATAGAATGTTCTAAACCATCC |
| p | TGCGGCCTCTACTCTGCATTCAA |
| (SEQ ID No. 282) | |
| Guide_Cas13bC- | GCAACACGTATGTACCAGGTTCCTGGAACTG |
| luc_84_ADAR29To | GAATCTCTTTCCATAGAATGTTCTAAACCAT |
| p | CCTGCGGCCTCTACTCTGCATTC |
| (SEQ ID No. 283) | |
| Guide_Cas13bC- | GCCCAACACGTATGTACCAGGTTCCTGGAAC |
| luc_84_ADAR30To | TGGAATCTCTTTCCATAGAATGTTCTAAACC |
| p | ATCCTGCGGCCTCTACTCTGCAT |
| (SEQ ID No. 284) | |
| Guide_Cas13bC- | GGACCCAACACGTATGTACCAGGTTCCTGGA |
| luc_84_ADAR31To | ACTGGAATCTCTTTCCATAGAATGTTCTAAA |
| p | CCATCCTGCGGCCTCTACTCTGC |
| (SEQ ID No. 285) | |
| Guide_Cas13bC- | GTTGACCCAACACGTATGTACCAGGTTCCTG |
| luc_84_ADAR32To | GAACTGGAATCTCTTTCCATAGAATGTTCTA |
| p | AACCATCCTGCGGCCTCTACTCT |
| (SEQ ID No. 286) | |
| Guide_Cas13bC- | GCCTTGACCCAACACGTATGTACCAGGTTCC |
| luc_84_ADAR33To | TGGAACTGGAATCTCTTTCCATAGAATGTTC |
| p | CTAAACCATCCTGCGGCCTCTACT |
| (SEQ ID No. 287) | |
| Guide_Cas13bC- | GTTCCTTGACCCAACACGTATGTACCAGGTT |
| luc_84_ADAR34To | CCTGGAACTGGAATCTCTTTCCATAGAATGT |
| p | TCTAAACCATCCTGCGGCCTCTA |
| (SEQ ID No. 288) | |
| Guide_Cas13bC- | GGGTTCCTTGACCCAACACGTATGTACCAGG |
| luc_84_ADAR35To | TTCCTGGAACTGGAATCTCTTTCCATAGAAT |
| p | GTTCTAAACCATCCTGCGGCCTC |
| (SEQ ID No. 289) | |
| Guide_Cas13bC- | GTTGGTTCCTTGACCCAACACGTATGTACCA |
| luc_84_ADAR36To | GGTTCCTGGAACTGGAATCTCTTTCCATAGA |
| p | ATGTTCTAAACCATCCTGCGGCC |
| (SEQ ID No. 290) | |
| Guide_Cas13bC- | GCCTTGGTTCCTTGACCCAACACGTATGTAC |
| luc_84_ADAR37To | CAGGTTCCTGGAACTGGAATCTCTTTCCATA |
| p | GAATGTTCTAAACCATCCTGCGG |
| (SEQ ID No. 291) | |
| Guide_Cas13bC- | GGCCCTTGGTTCCTTGACCCAACACGTATGT |
| luc_84_ADAR38To | ACCAGGTTCCTGGAACTGGAATCTCTTTCCA |
| p | TAGAATGTTCTAAACCATCCTGC |
| (SEQ ID No. 292) | |
| Guide_Cas13bC- | GCCGCCCTTGGTTCCTTGACCCAACACGTAT |
| luc_84_ADAR39To | GTACCAGGTTCCTGGAACTGGAATCTCTTTC |
| p | CATAGAATGTTCTAAACCATCCT |
| (SEQ ID No. 293) | |
| Guide_Cas13bC- | GCGCCGCCCTTGGTTCCTTGACCCAACACGT |
| luc_84_ADAR40To | ATGTACCAGGTTCCTGGAACTGGAATCTCTT |
| p | TCCATAGAATGTTCTAAACCATC |
| (SEQ ID No. 294) | |
| Guide_Cas13bC- | GGTCGCCGCCCTTGGTTCCTTGACCCAACAC |
| luc_84_ADAR41To | GTATGTACCAGGTTCCTGGAACTGGAATCTC |
| p | TTTCCATAGAATGTTCTAAACCA |
| (SEQ ID No. 295) | |

### Reversing Causal Disease Mutations

[1121] The three genes in the Table below are synthesised with the pathogenic G>A mutation that introduces a pre-termination stop site into the gene and integrate them into a non-human cell line. The ability of Cas13b12-ADAR2 to correct the transcripts by changing the stop codon UAG to UIG (UGG) and thus restore protein translation is tested.

| Protein | | | |
|---|---|---|---|
| length | | | |
| (aa) | Full length candidates | Gene | Disease |
| 498 | NM_004992.3 (MECP2): | MECP2 | Rett syndrome |
| | c.311G > A (p.Trp104Ter) | | |
| 414 | NM_007375.3 (TARDBP): | TARDBP | Amyotrophic lateral |
| | c.943G > A (p.Ala315Thr) | | sclerosis type 10 |
| 393 | NM_000546.5(TP53): | TP53 | Li-Fraumeni |
| | c.273G > A (p.Trp91Ter) | | syndrome\|Hereditary |
| | | | cancer-predisposing |
| | | | syndrome |

[1122] Forty-eight more pathogenic G>A mutations are shown in Table 5 below along with the accompanying disease. 200 bp fragments around these mutations are synthesised, rather than the entire gene, and cloned in front of a GFP. When the pre-termination site is restored, that will allow translation of the GFP and correction can be measured by fluorescence in high-throughput—in addition to RNA sequencing.

TABLE 5

| | Candidate | Gene | Disease |
|---|---|---|---|
| 1 | NM_004006.2(DMD): c.3747G > A (p.Trp1249Ter) | DMD | Duchenne muscular dystrophy |
| 2 | M_000344.3(SMN1): c.305G > A (p.Trp102Ter) | SMN1 | Spinal muscular atrophy, type II\|Kugelberg- |
| | | | Welander disease |
| 3 | NM_000492.3(CFTR): c.3846G > A (p.Trp1282Ter) | CFTR | Cystic fibrosis\|Hereditary |
| | | | pancreatitis\|not |
| | | | provided\|ataluren response- Efficacy |
| 4 | NM_004562.2(PRKN): c.1358G > A (p.Trp453Ter) | PRKN | Parkinson disease 2 |
| 5 | NM_017651.4(AHI1): c.2174G > A (p.Trp725Ter) | AHU | Joubert syndrome 3 |
| 6 | NM_000238.3(KCNH2): c.3002G > A (p.Trp1001Ter) | KCNH2 | Long QT syndrome\|not provided |
| 7 | NM_000136.2(FANCC): c.1517G > A (p.Trp506Ter) | FANCC C9orf 3 | Fanconi anemia, complementation group C |
| 8 | NM_001009944.2(PKD1): c.12420G > A (p.Trp4140Ter) | PKD1 | Polycystic kidney disease, adult type |
| 9 | NM_177965.3(C8orf37): c.555G > A (p.Trp185Ter) | C8orf37 | Retinitis pigmentosa 64 |
| 10 | NM_000833.4(GRIN2A): c.3813G > A (p.Trp1271Ter) | GRIN2A | Epilepsy, focal, with speech disorder and |
| | | | with or without mental retardation |
| 11 | NM_000548.4(TSC2): c.2108G > A (p.Trp703Ter) | TSC2 | Tuberous sclerosis 2\|Tuberous sclerosis syndrome |
| 12 | NM_000267.3(NF1): c.7044G > A (p.Trp2348Ter) | NF1 | Neurofibromatosis, type 1 |
| 13 | NM_000520.5(HEXA): c.1454G > A (p.Trp485Ter) | HEXA | Tay-Sachs disease |
| 14 | NM_130838.1(UBE3A): c.2304G > A (p.Trp768Ter) | UBE3A | Angelman syndrome |
| 15 | NM_000543.4(SMPDl): c.168G > A (p.Trp56Ter) | SMPD1 | Niemann-Pick disease, type A |
| 16 | NM_000218.2(KCNQ1): c.1175G > A (p.Trp392Ter) | KCNQ1 | Long QT syndrome |
| 17 | NM_000256.3(MYBPC3): c.3293G > A (p.Trp1098Ter) | MYBPC3 | Primary familial hypertrophic cardiomyopathy |
| 18 | NM_000038.5(APC): c.1262G > A (p.Trp421Ter) | APC | Familial adenomatous polyposis 1 |
| 19 | NM_000249.3(MLH1): c.1998G > A (p.Trp666Ter) | MLH1 | Lynch syndrome |
| 20 | NM_000054.4(AVPR2): c.878G > A (p.Trp293Ter) | AVPR2 | Nephrogenic diabetes insipidus, X-linked |
| 21 | NM_001204.6(BMPR2): c.893 G > A (p.W298*) | BMPR2 | Primary pulmonary hypertension |
| 22 | NM_004560.3(ROR2): c.2247G > A (p.Trp749Ter) | ROR2 | Brachydactyly type B1 |
| 23 | NM_000518.4(HBB): c.114G > A (p.Trp38Ter) | HBB | beta\hat{ }0\hat{ } Thalassemia\|beta Thalassemia |
| 24 | NM_024577.3(SH3TC2): c.920G > A (p.Trp307Ter) | SH3TC2 | Charcot-Marie-Tooth disease, type 4C |
| 25 | NM_206933.2(USH2A): c.9390G > A (p.Trp3130Ter) | USH2A | Usher syndrome, type 2A |
| 26 | NM_000179.2(MSH6): c.3020G > A (p.Trp1007Ter) | MSH6 | Lynch syndrome |
| 27 | NM_002977.3(SCN9A): c.2691G > A (p.Trp897Ter) | SCN9A\|LOC101929 | Indifference to pain, congenital, autosomal |
| | | 680 | recessive |
| 28 | NM_000090.3(COL3A1): c.30G > A (p.Trp10Ter) | COL3A1 | Ehlers-Danlos syndrome, type 4 |
| 29 | NM_000551.3(VHL): c.263G > A (p.Trp88Ter) | VHL | Von Hippel-Lindau syndrome\|not provided |
| 30 | NM_015627.2(LDLRAP1): c.65G > A (p.Trp22Ter) | LDLRAP1 | Hypercholesterolemia, autosomal recessive |
| 31 | NM_000132.3(F8): c.3144G > A (p.Trp1048Ter) | F8 | Hereditary factor VIII deficiency disease |
| 32 | NM_002185.4(IL7R): c.651G > A (p.Trp217Ter) | IL7R | Severe combined immunodeficiency, autosomal |
| | | | recessive, T cell negative, B cell-positive, |
| | | | NK cell-positive |
| 33 | NM_000527.4(LDLR): c.1449G > A (p.Trp483Ter) | LDLR | Familial hypercholesterolemia |
| 34 | NM_002294.2(LAMP2): c.962G > A (p.Trp321Ter) | LAMP2 | Danon disease |
| 35 | NM_000271.4(NPC1): c.1142G > A (p.Trp381Ter) | NPC1 | Niemann-Pick disease type Cl |
| 36 | NM_000267.3(NF1): c.1713G > A (p.Trp571Ter) | NF1 | Neurofibromatosis, type 1 |
| 37 | NM_000035.3(ALDOB): c.888G > A (p.Trp296Ter) | ALDOB | Hereditary fructosuria |
| 38 | NM_000090.3(COL3A1): c.3833G > A (p.Trp1278Ter) | COL3A1 | Ehlers-Danlos syndrome, type 4 |
| 39 | NM_001369.2(DNAH5): c.8465G > A (p.Trp2822Ter) | DNAH5 | Primary ciliary dyskinesia |
| 40 | NM_178443.2(FERMT3): c.48G > A (p.Trp16Ter) | FERMT3 | Leukocyte adhesion deficiency, type III |
| 41 | NM_005359.5(SMAD4): c.906G > A (p.Trp302Ter) | SMAD4 | Juvenile polyposis syndrome |
| 42 | NM_032119.3(ADGRV1): c.7406G > A (p.Trp2469Ter) | ADGRV1 | Usher syndrome, type 2C |
| 43 | NM_000206.2(IL2RG): c.710G > A (p.Trp237Ter) | IL2RG | X-linked severe combined immunodeficiency |
| 44 | NM_007294.3(BRCA1): c.5511G > A (p.Trp1837Ter) | BRCA1 | Familial cancer of breast\|Breast-ovarian |
| | | | cancer, familial 1 |
| 45 | NM_130799.2(MEN1): c.1269G > A (p.Trp423Ter) | MEN1 | Hereditary cancer-predisposing syndrome |
| 46 | NM_000071.2(CBS): c.162G > A (p.Trp54Ter) | CBS | Homocystinuria due to CBS deficiency |
| 47 | NM_000059.3(BRCA2): c.582G > A (p.Trp194Ter) | BRCA2 | Familial cancer of breast\|Breast-ovarian |
| | | | cancer, familial 2 |
| 48 | NM_000053.3(ATP7B): c.2336G > A (p.Trp779Ter) | ATP7B | Wilson disease |

### Example 3

[1123] Efficient and precise nucleic acid editing holds great promise for treating genetic disease, particularly at the level of RNA, where disease-relevant transcripts can be rescued to yield functional protein products. Type VI CRISPR-Cas systems contain the programmable single-effector RNA-guided RNases Cas13. Here, we profile the diversity of Type VI systems to engineer a Cas13 ortholog capable of robust knockdown and demonstrate RNA editing by using catalytically-inactive Cas13 (dCas13) to direct adenosine deaminase activity to transcripts in mammalian cells. By fusing the ADAR2 deaminase domain to dCas13 and engineering guide RNAs to create an optimal RNA duplex substrate, we achieve targeted editing of specific single adenosines to inosines (which is read out as guanosine during translation) with efficiencies routinely ranging from 20-40% and up to 89%. This system, referred to as RNA Editing for Programmable A to I Replacement (REPAIR), can be further engineered to achieve high specificity. An engineered variant, REPAIRv2, displays greater than 170-fold increase in specificity while maintaining robust on-target A to I editing as well as minimize the system to ease viral delivery. We use REPAIRv2 to edit full-length transcripts containing known pathogenic mutations and create functional truncated versions suitable for packaging in adeno-associated viral (AAV) vectors. REPAIR presents a promising RNA editing platform with broad applicability for research, therapeutics, and biotechnology. Precise nucleic acid editing technologies are valuable for studying cellular function and as novel therapeutics. Although current editing tools, such as the Cas9 nuclease, can achieve programmable modification of genomic loci, edits are often heterogenous due to insertions or deletions or require a donor template for precise editing. Base editors, such as dCas9-APOBEC fusions, allow for editing without generating a double stranded break, but may lack precision due to the nature of cytidine deaminase activity, which edits any cytidine in a target window. Furthermore, the requirement for a protospacer adjacent motif (PAM) limits the number of possible editing sites. Here, we describe the development of a precise and flexible RNA base editing tool using the RNA-guided RNA targeting Cas13 enzyme from type VI prokaryotic clustered regularly interspaced short palindromic repeats (CRISPR) adaptive immune system.

[1124] Precise nucleic acid editing technologies are valuable for studying cellular function and as novel therapeutics. Current editing tools, based on programmable nucleases such as the prokaryotic clustered regularly interspaced short palindromic repeats (CRISPR)-associated nucleases Cas9 (1-4) or Cpf1(5), have been widely adopted for mediating targeted DNA cleavage which in turn drives targeted gene disruption through non-homologous end joining (NHEJ) or precise gene editing through template-dependent homology-directed repair (HDR)(6). NHEJ utilizes host machineries that are active in both dividing and post-mitotic cells and provides efficient gene disruption by generating a mixture of insertion or deletion (indel) mutations that can lead to frame shifts in protein coding genes. HDR, in contrast, is mediated by host machineries whose expression is largely limited to replicating cells. As such, the development of gene-editing capabilities in post-mitotic cells remains a major challenge. Recently, DNA base editors, such as the use of catalytically inactive Cas9 (dCas9) to target cytidine deaminase activity to specific genome targets to effect cytosine to thymine conversions within a target window, allow for editing without generating a DNA double strand break and significantly reduces the formation of indels(7, 8). However the targeting range of DNA base editors is limited due to the requirement of Cas9 for a protospacer adjacent motif (PAM) at the editing site(9). Here, we describe the development of a precise and flexible RNA base editing technology using the type VI CRISPR-associated RNA-guided RNase Cas13(10-13).

[1125] Cas13 enzymes have two Higher Eukaryotes and Prokaryotes Nucleotide-binding (HEPN) endoRNase domains that mediate precise RNA cleavage(10, 11). Three Cas13 protein families have been identified to date: Cas13a (previously known as C2c2), Cas13b, and Cas13c(12, 13). We recently reported Cas13a enzymes can be adapted as tools for nucleic acid detection(14) as well as mammalian and plant cell RNA knockdown and transcript tracking(15). The RNA-guided nature of Cas13 enzymes makes them attractive tool for RNA binding and perturbation applications.

[1126] The adenosine deaminase acting on RNA (ADAR) family of enzymes mediates endogenous editing of transcripts via hydrolytic deamination of adenosine to inosine, a nucleobase that is functionally equivalent to guanosine in translation and splicing(16). There are two functional human ADAR orthologs, ADAR1 and ADAR2, which consist of N-terminal double stranded RNA-binding domains and a C-terminal catalytic deamination domain. Endogenous target sites of ADAR1 and ADAR2 contain substantial double stranded identity, and the catalytic domains require duplexed regions for efficient editing in vitro and in vivo (18,19). Importantly, the ADAR catalytic domain is capable of deaminating target adenosines without any protein co-factors in vitro (20). ADAR1 has been found to target mainly repetitive regions whereas ADAR2 mainly targets non-repetitive coding regions (17).Although ADAR proteins have preferred motifs for editing that could restrict the potential flexibility of targeting, hyperactive mutants, such as ADAR(E488Q)(21), relax sequence constraints and improve adenosine to inosine editing rates. ADARs preferentially deaminate adenosines opposite cytidine bases in RNA duplexes(22), providing a promising opportunity for precise base editing. Although previous approaches have engineered targeted ADAR fusions via RNA guides (23-26), the specificity of these approaches has not been reported and their respective targeting mechanisms rely on RNA-RNA hybridization without the assistance of protein partners that may enhance target recognition and stringency.

[1127] Here we assay the entire family of Cas13 enzymes for RNA knockdown activity in mammalian cells and identify the Cas13b ortholog from Prevotella sp. P5-125 (PspCas13b) as the most efficient and specific for mammalian cell applications. We then fuse the ADAR2 deaminase domain (ADARDD) to catalytically inactive PspCas13b and demonstrate RNA editing for programmable A to I (G) replacement (REPAIR) of reporter and endogenous transcripts as well as disease-relevant mutations. Lastly, we employ a rational mutagenesis scheme to improve the specificity of dCas13b-ADAR2DD fusions to generate REPAIRv2 with more than 170 fold increase in specificity.

### Methods

### Design and Cloning of Bacterial Constructs

[1128] Mammalian codon optimized Cas13b constructs were cloned into the chloramphenicol resistant pACYC184 vector under control of the Lac promoter. Two corresponding direct-repeat (DR) sequences separated by BsaI restriction sites were then inserted downstream of Cas13b, under control of the pJ23119 promoter. Last, oligos for targeting spacers were phosphorylated using T4 PNK (New England Biolabs), annealed and ligated into BsaI digested vectors using T7 ligase (Enzymatics) to generate targeting Cas13b vectors. Guide sequences used are in Table 11.

### Bacterial PFS Screens

[1129] Ampicillin resistance plasmids for PFS screens were cloned by inserting PCR products containing Cas13b targets with 2 5′ randomized nucleotides and 4 3′ randomized nucleotides separated by a target site immediately downstream of the start codon of the ampicillin resistance gene bla using NEB Gibson Assembly (New England Biolabs). 100 ng of ampicillin-resistant target plasmids were then electroporated with 65-100 ng chloramphenicol-resistant Cas13b bacterial targeting plasmids into Endura Electrocompetent Cells. Plasmids were added to cells, incubated 15 minutes on ice, electroporated using the manufacturer's protocol, and then 950 uL of recovery media was added to cells before a one hour outgrowth at 37C. The outgrowth was plated onto chloramphenicol and ampicillin double selection plates. Serial dilutions of the outgrowth were used to estimate the cfu/ng DNA. 16 hours post plating, cells were scraped off plates and surviving plasmid DNA harvested using the Qiagen Plasmid Plus Maxi Kit (Qiagen). Surviving Cas13b target sequences and their flanking regions were amplified by PCR and sequenced using an Illumina NextSeq. To assess PFS preferences, the positions containing randomized nucleotides in the original library were extracted, and sequences depleted relative to the vector only condition that were present in both bioreplicates were extracted using custom python scripts. The −log 2 of the ratio of PFS abundance in the Cas13b condition compared to the vector only control was then used to calculate preferred motifs. Specifically, all sequences having −log 2(sample/vector) depletion ratios above a specific threshold were used to generate weblogos of sequence motifs (weblogo.berkeley.edu). The specific depletion ratio values used to generate weblogos for each Cas13b ortholog are listed in Table 9.

### Design and Cloning of Mammalian Constructs for RNA Interference

[1130] To generate vectors for testing Cas13 orthologs in mammalian cells, mammalian codon optimized Cas13a, Cas13b, and Cas13c genes were PCR amplified and golden-gate cloned into a mammalian expression vector containing dual NLS sequences and a C-terminal msfGFP, under control of the EF1alpha promoter. For further optimization Cas13 orthologs were golden gate cloned into destination vectors containing different C-terminal localization tags under control of the EF1alpha promoter.

[1131] The dual luciferase reporter was cloned by PCR amplifying Gaussia and Cypridinia luciferase coding DNA, the EF1alpha and CMV promoters and assembly using the NEB Gibson Assembly (New England Biolabs).

[1132] For expression of mammalian guide RNA for Cas13a, Cas13b, or Cas13c orthologs, the corresponding direct repeat sequences were synthesized with golden-gate acceptor sites and cloned under U6 expression via restriction digest cloning. Individual guides were then cloned into the corresponding expression backbones for each ortholog by golden gate cloning. All Cas13 plasmids are listed in Table 10. All Cas13 guide sequences for knockdown experiments are listed in Tables 11-13.

### Measurement of Cas13 Expression in Mammalian Cells

[1133] Dual-NLS Cas13-msfGFP constructs were transfected into HEK293FT cells with targeting and non-targeting guides. GFP fluorescence was measured 48 hours post transfection in the non-targeting guide condition using a plate reader.

### Cloning of Pooled Mismatch Libraries for Cas13 Interference Specificity

[1134] Pooled mismatch library target sites were created by PCR. Oligos containing semi-degenerate target sequences in G-luciferase containing a mixture of 94% of the correct base and 2% of each incorrect base at each position within the target were used as one primer, and an oligo corresponding to a non-targeted region of G-luciferase was used as the second primer in the PCR reaction. The mismatch library target was then cloned into the dual luciferase reporter in place of the wildtype G-luciferase using NEB Gibson assembly (New England Biolabs).

### Design and Cloning of Mammalian Constructs for RNA Editing

[1135] PspCas13b was made catalytically inactive (dPspCas13b) via two histidine to alanine mutations (H133A/H1058A) at the catalytic site of the HEPN domains. The deaminase domains of human ADAR1 and ADAR2 were synthesized and PCR amplified for gibson cloning into pcDNA-CMV vector backbones and were fused to dPspCas13b at the C-terminus via GS or GSGGGGS (SEQ ID No. 296) linkers. For the experiment in which we tested different linkers we cloned the following additional linkers between dPspCas13b and ADAR2dd: GGGGSGGGGSGGGGS, EAAAK (SEQ ID No. 297), GGSGGSGGSGGSGGSGGS (SEQ ID No. 298), and SGSETPGTSESATPES (SEQ ID No. 299)(XTEN). Specificity mutants were generated by gibson cloning the appropriate mutants into the dPspCas13b-GSGGGGS backbone.

[1136] The luciferase reporter vector for measuring RNA editing activity was generated by creating a W85X mutation (TGG>TAG) in the luciferase reporter vector used for knockdown experiments. This reporter vector expresses functional Gluc as a normalization control, but a defective Cluc due to the addition of a pretermination site. To test ADAR editing motif preferences, we cloned every possible motif around the adenosine at codon 85 (XAX) of Cluc. All plasmids are listed in Table 10.

[1137] For testing PFS preference of REPAIR, we cloned a pooled plasmid library containing a 6 basepair degenerate PFS sequence upstream of a target region and adenosine editing site. The library was synthesized as an ultramer from Integrated DNA Technologies (IDT) and was made double stranded via annealing a primer and Klenow fragment of DNA polymerase I (New England Biolabs) fill in of the sequence. This dsDNA fragment containing the degenerate sequence was then gibson cloned into the digested reporter vector and this was then isopropanol precipitated and purified. The cloned library was then electroporated into Endura competent E. coli cells (Lucigen) and plated on 245 mm×245 mm square bioassay plates (Nunc). After 16 hours, colonies were harvested and midiprepped using endotoxin-free MACHEREY-NAGEL midiprep kits. Cloned libraries were verified by next generation sequencing.

[1138] For cloning disease-relevant mutations for testing REPAIR activity, 34 G>A mutations related to disease pathogenesis as defined in ClinVar were selected and 200 bp regions surrounding these mutations were golden gate cloned between mScarlett and EGFP under a CMV promoter. Two additional G>A mutations in AVPR2 and FANCC were selected for Gibson cloning the whole gene sequence under expression of EF1alpha.

[1139] For expression of mammalian guide RNA for REPAIR, the PspCas13b direct repeat sequences were synthesized with golden-gate acceptor sites and cloned under U6 expression via restriction digest cloning. Individual guides were then cloned into this expression backbones by golden gate cloning. Guide sequences for REPAIR experiments are listed in Table 14.

### Mammalian Cell Culture

[1140] Mammalian cell culture experiments were performed in the HEK293FT line (American Type Culture Collection (ATCC)), which was grown in Dulbecco's Modified Eagle Medium with high glucose, sodium pyruvate, and GlutaMAX (Thermo Fisher Scientific), additionally supplemented with 1×penicillin-streptomycin (Thermo Fisher Scientific) and 10% fetal bovine serum (VWR Seradigm). Cells were maintained at confluency below 80%.

[1141] Unless otherwise noted, all transfections were performed with Lipofectamine 2000 (Thermo Fisher Scientific) in 96-well plates coated with poly-D-lysine (BD Biocoat). Cells were plated at approximately 20,000 cells/well sixteen hours prior to transfection to ensure 90% confluency at the time of transfection. For each well on the plate, transfection plasmids were combined with Opti-MEM I Reduced Serum Medium (Thermo Fisher) to a total of 25 μl. Separately, 24.5 ul of Opti-MEM was combined with 0.5 ul of Lipofectamine 2000. Plasmid and Lipofectamine solutions were then combined and incubated for 5 minutes, after which they were pipetted onto cells. The U2OS transfections were performed using Lipofectamine 3000 according to the manufacturer's protocol.

### RNA Knockdown Mammalian Cell Assays

[1142] To assess RNA targeting in mammalian cells with reporter constructs, 150 ng of Cas13 construct was co-transfected with 300 ng of guide expression plasmid and 12.5 ng of the knockdown reporter construct. 48 hours post-transfection, media containing secreted luciferase was removed from cells, diluted 1:5 in PBS, and measured for activity with BioLux Cypridinia and Biolux Gaussia luciferase assay kits (New England Biolabs) on a plate reader (Biotek Synergy Neo2) with an injection protocol. All replicates performed are biological replicates.

[1143] For targeting of endogenous genes, 150 ng of Cas13 construct was co-transfected with 300 ng of guide expression plasmid. 48 hours post-transfection, cells were lysed and RNA was harvested and reverse transcribed using a previously described (33) modification of the Cells-to-Ct kit (Thermo Fisher Scientific). cDNA expression was measured via qPCR using TaqMan qPCR probes for the KRAS transcript (Thermo Fisher Scientific), GAPDH control probes (Thermo Fisher Scientific), and Fast Advanced Master Mix (Thermo Fisher Scientific). qPCR reactions were read out on a LightCycler 480 Instrument II (Roche), with four 5 ul technical replicates in 384-well format.

### Evaluation of RNA Specificity Using Pooled Library of Mismatched Targets

[1144] The ability of Cas13 to interfere with the mismatched target library was tested using HEK293FT cells seeded in 6 well plates. ˜70% confluent cells were transfected using 2400 ng Cas13 vector, 4800 ng of guide and 240 ng of mismatched target library. 48 hours post transfection, cells were harvested and RNA extracted using the QIAshredder (Qiagen) and the Qiagen RNeasy Mini Kit. lug of extracted RNA was reverse transcribed using the qScript Flex cDNA synthesis kit (Quantabio) following the manufacturer's gene-specific priming protocol and a Gluc specific RT primer. cDNA was then amplified and sequenced on an Illumina NextSeq.

[1145] The sequencing was analyzed by counting reads per sequence and depletion scores were calculated by determining the log 2(-read count ratio) value, where read count ratio is the ratio of read counts in the targeting guide condition versus the non-targeting guide condition. This score value represents the level of Cas13 activity on the sequence, with higher values representing stronger depletion and thus higher Cas13 cleavage activity. Separate distributions for the single mismatch and double mismatch sequences were determined and plotted as heatmaps with a depletion score for each mismatch identity. For double mismatch sequences the average of all possible double mismatches at a given position were plotted.

### Transcriptome-Wide Profiling of Cas13 in Mammalian Cells by RNA Sequencing

[1146] For measurement of transcriptome-wide specificity, 150 ng of Cas13 construct, 300 ng of guide expression plasmid and 15 ng of the knockdown reporter construct were co-transfected; for shRNA conditions, 300 ng of shRNA targeting plasmid, 15 ng of the knockdown reporter construct, and 150 ng of EF1-alpha driven mCherry (to balance reporter load) were co-transfected. 48 hours after transfection, RNA was purified with the RNeasy Plus Mini kit (Qiagen), mRNA was selected for using NEBNext Poly(A) mRNA Magnetic Isolation Module (New England Biolabs) and prepared for sequencing with the NEBNext Ultra RNA Library Prep Kit for Illumina (New England Biolabs). RNA sequencing libraries were then sequenced on a NextSeq (Illumina).

[1147] To analyze transcriptome-wide sequencing data, reads were aligned RefSeq GRCh38 assembly using Bowtie and RSEM version 1.2.31 with default parameters (34): accurate transcript quantification from RNA-Seq data with or without a reference genome]. Transcript expression was quantified as log 2(TPM+1), genes were filtered for log 2(TPM+1) >2.5 For selection of differentially expressed genes, only genes with differential changes of >2 or <0.75 were considered. Statistical significance of differential expression was evaluated Student's T-test on three targeting replicates versus non-targeting replicates, and filtered for a false discovery rate of <0.01% by Benjamini-Hochb erg procedure.

### ADAR RNA Editing in Mammalian Cells Transfections

[1148] To assess REPAIR activity in mammalian cells, we transfected 150 ng of REPAIR vector, 300 ng of guide expression plasmid, and 40 ng of the RNA editing reporter. After 48 hours, RNA from cells were harvested and reverse transcribed using a method previously described (33) with a gene specific reverse transcription primer. The extracted cDNA was then subjected to two rounds of PCR to add Illumina adaptors and sample barcodes using NEBNext High-Fidelity 2X PCR Master Mix (New England Biolabs). The library was then subjected to next generation sequencing on an Illumina NextSeq or MiSeq. RNA editing rates were then evaluated at all adenosine within the sequencing window.

[1149] In experiments where the luciferase reporter was targeted for RNA editing, we also harvested the media with secreted luciferase prior to RNA harvest. In this case, because the corrected Cluc might be at low levels, we did not dilute the media. We measured luciferase activity with BioLux Cypridinia and Biolux Gaussia luciferase assay kits (New England Biolabs) on a plate reader (Biotek Synergy Neo2) with an injection protocol. All replicates performed are biological replicates.

### PFS Binding Mammalian Screen

[1150] To determine the contribution of the PFS to editing efficiency, 625 ng of PFS target library, 4.7 ug of guide, and 2.35 ug of REPAIR were co-transfected on HEK293FT cells plated in 225 cm2 flasks. Plasmids were mixed with 33 ul of PLUS reagent (Thermo Fisher Scientific), brought to 533 ul with Opti-MEM, incubated for 5 minutes, combined with 30 ul of Lipofectamine 2000 and 500 ul of Opti-MEM, incubated for an additional 5 minutes, and then pipetted onto cells. 48 hours post-transfection, RNA was harvested with the RNeasy Plus Mini kit (Qiagen), reverse transcribed with qScript Flex (Quantabio) using a gene specific primer, and amplified with two rounds of PCR using NEBNext High-Fidelity 2×PCR Master Mix (New England Biolabs) to add Illumina adaptors and sample barcodes. The library was sequenced on an Illumina NextSeq, and RNA editing rates at the target adenosine were mapped to PFS identity. To increase coverage, the PFS was computationally collapsed to 4 nucleotides. REPAIR editing rates were calculated for each PFS, averaged over biological replicates with non-targeting rates for the corresponding PFS subtracted.

### Whole-Transcriptome Sequencing to Evaluate ADAR Editing Specificity

[1151] For analyzing off-target RNA editing sites across the transcriptome, we harvested total RNA from cells 48 hours post transfection using the RNeasy Plus Miniprep kit (Qiagen). The mRNA fraction is then enriched using a NEBNext Poly(A) mRNA Magnetic Isolation Module (NEB) and this RNA is then prepared for sequencing using NEBNext Ultra RNA Library Prep Kit for Illumina (NEB). The libraries were then sequenced on an Illumina NextSeq and loaded such that there was at least 5 million reads per sample.

### RNA Editing Analysis for Targeted and Transcriptome Wide Experiments

[1152] Analysis of the transcriptome-wide editing RNA sequencing data was performed on the FireCloud computational framework (https://software.broadinstitute.org/firecloud/) using a custom workflow we developed: https://portal.firecloud.org/#methods/m/rna_editing_final_workflow/rna_editing_final_workflow/1. For analysis, unless otherwise denoted, sequence files were randomly downsampled to 5 million reads. An index was generated using the RefSeq GRCh38 assembly with Gluc and Cluc sequences added and reads were aligned and quantified using Bowtie/RSEM version 1.3.0. Alignment BAMs were then sorted and analyzed for RNA editing sites using REDitools (35,36) with the following parameters: -t 8 -e -d -l -U [AG or TC]-p -u -m20 -T6-0 -W -v 1-n 0.0. Any significant edits found in untransfected or EGFP-transfected conditions were considered to be SNPs or artifacts of the transfection and filtered out from the analysis of off-targets. Off-targets were considered significant if the Fisher's exact test yielded a p-value less than 0.05 after multiple hypothesis correction by Benjamini Hochberg correction and at least 2 of 3 biological replicates identified the edit site. Overlap of edits between samples was calculated relative to the maximum possible overlap, equivalent to the fewer number of edits between the two samples. The percentage of overlapplng edit sites was calculated as the number of shared edit sites divided by minimum number of edits of the two samples, multiplied by 100. For the high-coverage sequencing analysis, an additional layer of filtering for known SNP positions was performed using the Kaviar (37) method for identifying SNPs.

[1153] For analyzing the predicted variant effects of each off-target, the list of off-target edit sites was analyzed using the variant annotation integrator (https://genome.ucsc.edu/cgi-bin/hgVai) as part of the UCSC genome browser suite of tools using the SIFT and PolyPhen-2 annotations. To declare whether the off-target genes are oncogenic, a database of oncogenic annotations from the COSMIC catalogue of somatic mutations in cancer (cancer. sanger.ac.uk).

[1154] For analyzing whether the REPAIR constructs perturbed RNA levels, the transcript per million (TPM) values output from the RSEM analysis were used for expression counts and transformed to log-space by taking the log 2(TPM+1). To find differentially regulated genes, a Student's t-test was performed on three targeting guide replicates versus three non-targeting guide replicates. The statistical analysis was only performed on genes with log 2(TPM+1) values greater than 2.5 and genes were only considered differentially regulated if they had a fold change greater than 2 or less than 0.8. Genes were reported if they had a false discovery rate of less than 0.01.

### Results

### Comprehensive Characterization of Cas13 Family Members in Mammalian Cells

[1155] We previously developed LwaCas13a for mammalian knockdown applications, but it required an msfGFP stabilization domain for efficient knockdown and, although the specificity was high, knockdown efficiencies were not consistently below 50%(15). We sought to identify a more robust RNA-targeting CRISPR system by characterizing a genetically diverse set of Cas13 family members to assess their RNA knockdown activity in mammalian cells (FIG. 49A). We cloned 21 Cas13a, 15 Cas13b, and 7 Cas13c mammalian codon-optimized orthologs (Table 6) into an expression vector with N- and C-terminal nuclear export signal (NES) sequences and a C-terminal msfGFP to enhance protein stability. To assay interference in mammalian cells, we designed a dual reporter construct expressing the orthogonal Gaussia (Gluc) and Cypridinia (Cluc) luciferases under separate promoters, which allows one luciferase to function as a measure of Cas13 interference activity and the other to serve as an internal control. For each ortholog, we designed PFS-compatible guide RNAs, using the Cas13b PFS motifs derived from an ampicillin interference assay (FIGS. 55A-55C; Table 7) and the 3′ H PFS (not G) from previous reports of Cas13a activity(10).

[1156] We transfected HEK293FT cells with Cas13 expression, guide RNA and reporter plasmids and quantified levels of the targeted Gluc 48 hours later (FIGS. 49B, 69A). Testing two guide RNAs for each Cas13 ortholog revealed a range of activity levels, including five Cas13b orthologs with similar or increased interference across both guide RNAs relative to the recently characterized LwaCas13a (FIG. 49B), and we observed only a weak correlation between Cas13 expression and interference activity (FIG. 69B-69D). We selected these five Cas13b orthologs, as well as the top two Cas13a orthologs for further engineering.

[1157] We next tested for Cas13-mediated knockdown of Gluc without msfGFP, in order to select orthologs that do not require stabilization domains for robust activity. We hypothesized that, in addition to msfGFP, Cas13 activity could be affected by subcellular localization, as previously reported for optimization of LwaCas13a(15). Therefore, we tested the interference activity of the seven selected Cas13 orthologs C-terminally fused to one of six different localization tags without msfGFP. Using the luciferase reporter assay, we found that PspCas13b and PguCas13b C-terminally fused to the HIV Rev gene NES and RanCas13b C-terminally fused to the MAPK NES had the highest levels of interference activity (FIG. 56A). To further distinguish activity levels of the top orthologs, we compared the three optimized Cas13b constructs to the optimal LwaCas13a-msfGFP fusion and shRNA for their ability to knockdown the KRAS transcript using position-matched guides (FIG. 56B). We observed the highest levels interference for PspCas13b (average knockdown 62.9%) and thus selected this for further comparison to LwaCas13 a.

[1158] To more rigorously define the activity level of PspCas13b and LwaCas13a we designed position matched guides tiling along both Gluc and Cluc and assayed their activity using our luciferase reporter assay. We tested 93 and 20 position matched guides targeting Gluc and Cluc, respectively, and found that PspCas13b had consistently increased levels of knockdown relative to LwaCas13a (average of 92.3% for PspCas13b vs. 40.1% knockdown for LwaCas13a) (FIG. 49C, 49D).

### Specificity of Cas13 Mammalian Interference Activity

[1159] To characterize the interference specificities of PspCas13b and LwaCas13a we designed a plasmid library of luciferase targets containing single mismatches and double mismatches throughout the target sequence and the three flanking 5′ and 3′ base pairs (FIG. 56C). We transfected HEK293FT cells with either LwaCas13a or PspCas13b, a fixed guide RNA targeting the unmodified target sequence, and the mismatched target library corresponding to the appropriate system. We then performed targeted RNA sequencing of uncleaved transcripts to quantify depletion of mismatched target sequences. We found that LwaCas13a and PspCas13b had a central region that was relatively intolerant to single mismatches, extending from base pairs 12-26 for the PspCas13b target and 13-24 for the LwaCas13a target (FIG. 56D). Double mismatches were even less tolerated than single mutations, with little knockdown activity observed over a larger window, extending from base pairs 12-29 for PspCas13b and 8-27 for LwaCas13a in their respective targets (FIG. 56E). Additionally, because there are mismatches included in the three nucleotides flanking the 5′ and 3′ ends of the target sequence, we could assess PFS constraints on Cas13 knockdown activity. Sequencing showed that almost all PFS combinations allowed robust knockdown, indicating that a PFS constraint for interference in mammalian cells likely does not exist for either enzyme tested. These results indicate that Cas13a and Cas13b display similar sequence constraints and sensitivities against mismatches.

[1160] We next characterized the interference specificity of PspCas13b and LwaCas13a across the mRNA fraction of the transcriptome. We performed transcriptome-wide mRNA sequencing to detect significant differentially expressed genes. LwaCas13a and PspCas13b demonstrated robust knockdown of Gluc (FIG. 49E,F) and were highly specific compared to a position-matched shRNA, which showed hundreds of off-targets (FIG. 49G), consistent with our previous characterization of LwaCas13a specificity in mammalian cells (15).

### Cas13-ADAR Fusions Enable Targeted RNA Editing

[1161] Given that PspCas13b achieved consistent, robust, and specific knockdown of mRNA in mammalian cells, we envisioned that it could be adapted as an RNA binding platform to recruit the deaminase domain of ADARs (ADARDD) for programmable RNA editing. To engineer a PspCas13b lacking nuclease activity (dPspCas13b, referred to as dCas13b from here), we mutated conserved catalytic residues in the HEPN domains and observed loss of luciferase RNA knockdown activity (FIG. 57A). We hypothesized that a dCas13b-ADARDD fusion could be recruited by a guide RNA to target adenosines, with the hybridized RNA creating the required duplex substrate for ADAR activity (FIG. 50A). To enhance target adenosine deamination rates we introduced two additional modifications to our initial RNA editing design: we introduced a mismatched cytidine opposite the target adenosine, which has been previously reported to increase deamination frequency, and fused dCas13b with the deaminase domains of human ADAR1 or ADAR2 containing hyperactivating mutations to enhance catalytic activity (ADAR1DD(E1008Q)(27) or ADAR2DD(E488Q)(21)).

[1162] To test the activity of dCas13b-ADARDD we generated an RNA-editing reporter on Cluc by introducing a nonsense mutation (W85X (UGG->UAG)), which could functionally be repaired to the wildtype codon through A->I editing (FIG. 50B) and then be detected as restoration of Cluc luminescence. We evenly tiled guides with spacers 30, 50, 70 or 84 nucleotides in length across the target adenosine to determine the optimal guide placement and design (FIG. 50C). We found that dCas13b-ADAR1DD required longer guides to repair the Cluc reporter, while dCas13b-ADAR2DD was functional with all guide lengths tested (FIG. 50C). We also found that the hyperactive E488Q mutation improved editing efficiency, as luciferase restoration with the wildtype ADAR2DD was reduced (FIG. 57B). From this demonstration of activity, we chose dCas13b-ADAR2DD(E488Q) for further characterization and designated this approach as RNA Editing for Programmable A to I Replacement version 1 (REPAIRv1).

[1163] To validate that restoration of luciferase activity was due to bona fide editing events, we measured editing of Cluc transcripts subject to REPAIRv1 directly via reverse transcription and targeted next-generation sequencing. We tested 30- and 50-nt spacers around the target site and found that both guide lengths resulted in the expected A to I edit, with 50-nt spacers achieving higher editing percentages (FIGS. 50D, 50E, FIG. 57C). We also observed that 50-nt spacers had an increased propensity for editing at non-targeted adenosines, likely due to increased regions of duplex RNA (FIG. 50E, FIG. 57C).

[1164] We next targeted an endogenous gene, PPIB. We designed 50-nt spacers tiling PPIB and found that we could edit the PPIB transcript with up to 28% editing efficiency (FIG. 57D). To test if REPAIR could be further optimized, we modified the linker between dCas13b and ADAR2DD(E488Q) (FIG. 57E, Table 8) and found that linker choice modestly affected luciferase activity restoration. Additionally, we tested the ability of dCas13b and guide alone to mediate editing events, finding that the ADAR deaminase domain is required for editing (FIGS. 70A-70D).

### Defining the Sequence Parameters for RNA Editing

[1165] Given that we could achieve precise RNA editing at a test site, we wanted to characterize the sequence constraints for programming the system against any RNA target in the transcriptome. Sequence constraints could arise from dCas13b targeting limitations, such as the PFS, or from ADAR sequence preferences(28). To investigate PFS constraints on REPAIRv1, we designed a plasmid library carrying a series of four randomized nucleotides at the 5′ end of a target site on the Cluc transcript (FIG. 51A). We targeted the center adenosine within either a UAG or AAC motif and found that for both motifs, all PFSs demonstrated detectable levels of RNA editing, with a majority of the PFSs having greater than 50% editing at the target site (FIG. 51B). Next, we sought to determine if the ADAR2DD in REPAIRv1 had any sequence constraints immediately flanking the targeted base, as has been reported previously for ADAR2DD(28).We tested every possible combination of 5′ and 3′ flanking nucleotides directly surrounding the target adenosine (FIG. 51C), and found that REPAIRv1 was capable of editing all motifs (FIG. 51D). Lastly, we analyzed whether the identity of the base opposite the target A in the spacer sequence affected editing efficiency and found that an A-C mismatch had the highest luciferase restoration with A-G, A-U, and A-A having drastically reduced REPAIRv1 activity (FIG. 57F, 70E).

### Correction of Disease-Relevant Human Mutations Using REPAIRv1

[1166] To demonstrate the broad applicability of the REPAIRv1 system for RNA editing in mammalian cells, we designed REPAIRv1 guides against two disease relevant mutations: 878G>A (AVPR2 W293X) in X-linked Nephrogenic diabetes insipidus and 1517G>A (FANCC W506X) in Fanconi anemia. We transfected expression constructs for cDNA of genes carrying these mutations into HEK293FT cells and tested whether REPAIRv1 could correct the mutations. Using guide RNAs containing 50-nt spacers, we were able to achieve 35% correction of AVPR2 and 23% correction of FANCC (FIGS. 52A-52D). We then tested the ability of REPAIRv1 to correct 34 different disease-relevant G>A mutations (Table 9) and found that we were able to achieve significant editing at 33 sites with up to 28% editing efficiency (FIG. 52E). The mutations we chose are only a fraction of the pathogenic G to A mutations (5,739) in the ClinVar database, which also includes an additional 11,943 G to A variants (FIG. 52F and FIG. 58). Because there are no sequence constraints, REPAIRv1 is capable of potentially editing all these disease relevant mutations, especially given that we observed significant editing regardless of the target motif (FIG. 51C and FIG. 52G).

[1167] Delivering the REPAIRv1 system to diseased cells is a prerequisite for therapeutic use, and we therefore sought to design REPAIRv1 constructs that could be packaged into therapeutically relevant viral vectors, such as adeno-associated viral (AAV) vectors. AAV vectors have a packaging limit of 4.7 kb, which cannot accommodate the large size of dCas13b-ADARDD (4473 bp) along with promoter and expression regulatory elements. To reduce the size, we tested a variety of N-terminal and C-terminal truncations of dCas13 fused to ADAR2DD(E488Q) for RNA editing activity. We found that all C-terminal truncations tested were still functional and able to restore luciferase signal (FIG. 59), and the largest truncation, C-terminal Δ984-1090 (total size of the fusion protein 4,152 bp) was small enough to fit within the packaging limit of AAV vectors.

### Transcriptome-Wide Specificity of REPAIRv1

[1168] Although RNA knockdown with PspCas13b was highly specific, in our luciferase tiling experiments, we observed off-target adenosine editing within the guide:target duplex (FIG. 50E). To see if this was a widespread phenomenon, we tiled an endogenous transcript, KRAS, and measured the degree of off-target editing near the target adenosine (FIG. 53A). We found that for KRAS, while the on-target editing rate was 23%, there were many sites around the target site that also had detectable A to G edits (FIG. 53B).

[1169] Because of the observed off-target editing within the guide:target duplex, we evaluated all possible transcriptome off-targets by performing RNA sequencing on all mRNAs. RNA sequencing revealed that there was a significant number A to G off-target events, with 1,732 off-targets in the targeting condition and 925 off-targets in the non-targeting condition, with 828 off-targets overlapplng (FIGS. 53C, 523D). Of all the editing sites across the transcriptome, the on-target editing site had the highest editing rate, with 89% A to G conversion.

[1170] Given the high specificity of Cas13 targeting, we reasoned that the off-targets may arise from ADAR. We repeated the Cluc targeting experiment, this time comparing transcriptome changes for REPAIRv1 with a targeting guide, REPAIRv1 with a non-targeting guide, REPAIRv1 alone, or ADARDD(E488Q) alone (FIGS. 71A-71D). We found differentially expressed genes and off-target editing events in each condition (FIG. 71C). Interestingly, there was a high degree of overlap in the off-target editing events between ADARDD(E488Q) and all REPAIRv1 off-target edits, supporting the hypothesis that REPAIR off-target edits are driven by dCas13b-independent ADARDD(E488Q) editing events (FIGS. 71A-71D).

[1171] Two RNA-guided ADAR systems have been described previously (FIG. 60A). The first utilizes a fusion of ADAR2_{DD} to the small viral protein lambda N ( [symbol] N), which binds to the BoxB- [symbol] RNA hairpin(22). A guide RNA with double BoxB- [symbol] hairpins guides ADAR2_{DD} to edit sites encoded in the guide RNA(23). The second design utilizes full length ADAR2 (ADAR2) and a guide RNA with a hairpin that the double strand RNA binding domains (dsRBDs) of ADAR2 recognize(21, 24). We analyzed the editing efficiency of these two systems compared to REPAIRv1 and found that the BoxB-ADAR2 and ADAR2 systems demonstrated 63% and 36% editing rates, respectively, compared to the 89% editing rate achieved by REPAIRv1 (FIGS. 60B-60E). Additionally, the BoxB and ADAR2 systems created 2018 and 174 observed off targets, respectively, in the targeting guide conditions, compared to the 1,229 off targets in the REPAIRv1 targeting guide condition. Notably, all the conditions with the two ADAR2DD-based systems (REPAIRv1 and BoxB) showed a high percentage of overlap in their off-targets while the ADAR2 system had a largely distinct set of off-targets (FIG. 60F). The overlap in off-targets between the targeting and non-targeting conditions and between REPAIRv1 and BoxB conditions suggest ADAR2_{DD} drove off-targets independent of dCas13 targeting (FIG. 60F).

### Improving Specificity of REPAIRv1 Through Rational Protein Engineering

[1172] To improve the specificity of REPAIR, we employed structure-guided protein engineering of ADAR2DD(E488Q). Because of the guide-independent nature of off-targets, we hypothesized that destabilizing ADAR2DD(E488Q)-RNA binding would selectively decrease off-target editing, but maintain on-target editing due to increased local concentration from dCas13b tethering of ADAR2DD(E488Q) to the target site. We mutagenized ADAR2DD(E488Q) residues previously determined to contact the duplex region of the target RNA (FIG. 54A)(18) on the ADAR2DD(E488Q) background. To assess efficiency and specificity, we tested 17 single mutants with both targeting and non-targeting guides, under the assumption that background luciferase restoration in the non-targeting condition detected would be indicative of broader off-target activity. We found that mutations at the selected residues had significant effects on the luciferase activity for targeting and non-targeting guides (FIGS. 54A, 54B, FIG. 61A). A majority of mutants either significantly improved the luciferase activity for the targeting guide or increased the ratio of targeting to non-targeting guide activity, which we termed the specificity score (FIGS. 54A, 54B). We selected a subset of these mutants (FIG. 54B) for transcriptome-wide specificity profiling by next generation sequencing. As expected, off-targets measured from transcriptome-wide sequencing correlated with our specificity score (FIG. 61B) for mutants. We found that with the exception of ADAR2DD(E488Q/R455E), all sequenced REPAIRv1 mutants could effectively edit the reporter transcript (FIG. 54C), with many mutants showing reduction in the number of off-targets (FIGS. 61C, 62). We further explored the surrounding motifs of off-targets for specificity mutants, and found that REPAIRv1 and most of the engineered mutants exhibited a strong 3′ G preference for their edits, in agreement with the characterized ADAR2 motif (FIG. 63A)(28). We selected the mutant ADAR2DD(E488Q/T375G) for future experiments, as it had the highest percent editing of the four mutants with the lowest numbers of transcriptome-wide off targets and termed it REPAIRv2. Compared to REPAIRv1, REPAIRv2 exhibited increased specificity, with a reduction from 18,385 to 20 transcriptome-wide off-targets by high-coverage sequencing (125×coverage, 10 ng DNA transfection) (FIG. 54D). In the region surrounding the targeted adenosine in Cluc, REPAIRv2 had reduced off-target editing, visible in sequencing traces (FIG. 54E). In motifs derived from next-generation sequencing, REPAIRv1 presented a strong preference towards 3′ G, but showed off-targeting edits for all motifs (FIG. 63B); by contrast, REPAIRv2 only edited the strongest off-target motifs (FIG. 63C). The distribution of edits on transcripts was heavily skewed, with highly-edited genes having over 60 edits (FIGS. 64A, 64B), whereas REPAIRv2 only edited one transcript (EEF1A1) multiple times (FIGS. 64D-F). REPAIRv1 off-target edits were predicted to result in numerous variants, including 1000 missense mutations (FIG. 64C) with 93 oncogenic events (FIG. 64D). In contrast, REPAIRv2 only had 6 missense mutations (FIG. 64E), none of which had oncogenic consequences (FIG. 64F). This reduction in predicted off-target effects distinguishes REPAIRv2 from other RNA editing approaches. Experiments with different dosages of guide RNA suggests that dose response may reduce off target activity (FIG. 68).

[1173] Analysis of the sequence surrounding off-target edits for REPAIRv1 or v2 did not reveal homology to guide sequences, suggesting that off-targets are likely dCas13b-independent (FIG. 72), consistent with the high overlap of off-targets between REPAIRv1 and the ADAR deaminase domain (FIG. 71D). To directly compare REPAIRv2 against other programmable ADAR systems, we repeated our Cluc targeting experiments with all systems at two different dosages of ADAR vector, finding that REPAIRv2 had comparable on-target editing to BoxB and ADAR2 but with significantly fewer off-target editing events at both dosages (FIG. 73). REPAIRv2 had enhanced specificity compared to REPAIRv1 at both dosages (FIG. 73B), a finding that also extended to two guides targeting distinct sites on PPIB (FIGS. 74A-74D). It is also worth noting that, in general, the lower dosage condition (10 ng) had fewer off-targets than the higher dosage condition (150 ng) (FIG. 70).

[1174] To assess editing specificity with greater sensitivity, we sequenced the low dosage condition (10 ng of transfected DNA) of REPAIRv1 and v2 at significantly higher sequencing depth (125× coverage of the transcriptome). Increased numbers of off-targets were found at higher sequencing depths corresponding to detection of rarer off-target events (FIG. 75). Furthermore, we speculated that different transcriptome states could also potentially alter the number of off-targeting events. Therefore, we tested REPAIRv2 activity in the osteosarcoma U2OS cell line, observing 6 and 7 off-targets for the targeting and non-targeting guide, respectively (FIG. 76).

[1175] We targeted REPAIRv2 to endogenous genes to test if the specificity-enhancing mutations reduced nearby edits in target transcripts while maintaining high-efficiency on-target editing. For guides targeting either KRAS or PPIB, we found that REPAIRv2 had no detectable off-target edits, unlike REPAIRv1, and could effectively edit the on-target adenosine at 27.1% and 13%, respectively (FIGS. 54F, 54G). This specificity extended to additional target sites, including regions that demonstrate high-levels of background in non-targeting conditions for REPAIRv1, such as other KRAS or PPIB target sites (FIGS. 65A-65C). Overall, REPAIRv2 eliminated off-targets in duplexed regions around the edited adenosine and showed dramatically enhanced transcriptome-wide specificity.

### CONCLUSION

[1176] We have shown here that the RNA-guided RNA-targeting type VI-B effector Cas13b is capable of highly efficient and specific RNA knockdown, providing the basis for improved tools for interrogating essential genes and non-coding RNA as well as controlling cellular processes at the transcriptomic level. Catalytically inactive Cas13b (dCas13b) retains programmable RNA binding capability, which we leveraged here by fusing dCas13b to the adenosine deaminase ADAR2 to achieve precise A to I edits, a system we term REPAIRv1 (RNA Editing for Programmable A to I Replacement version 1). Further engineering of the system produced REPAIRv2, a method with comparable or increased activity relative to current editing platforms with dramatically improved specificity than previously described RNA editing platforms (25, 29) while maintaining high levels of on-target efficacy.

[1177] Although Cas13b exhibits high fidelity, our initial results with dCas13b-ADAR2DD fusions revealed thousands of off-targets. To address this, we employed a rational mutagenesis strategy to vary the ADAR2DD residues that contact the RNA duplex, identifying a variant, ADAR2DD(E488Q/T375G), capable of precise, efficient, and highly specific editing when fused to dCas13b. Editing efficiency with this variant was comparable to or better than that achieved with two currently available systems, BoxB-ADARDD or ADAR2 editing. Moreover, the REPAIRv2 system created only 10 observable off-targets in the whole transcriptome, at least an order of magnitude better than both alternative editing technologies. While it is possible that ADAR could deaminate adenosine bases on the DNA strand in RNA-DNA heteroduplexes (20), it is unlikely to do so in this case as Cas13b does not bind DNA efficiently and that REPAIR is cytoplasmically localized. Additionally, the lack of homology of off-target sites to the guide sequence and the strong overlap of off-targets with the ADARDD(E488Q)-only condition suggest that off-targets are not mediated by off-target guide binding. Deeper sequencing and novel inosine enrichment methods could further refine our understanding of REPAIR specificity in the future.

[1178] The REPAIR system offers many advantages compared to other nucleic acid editing tools. First, the exact target site can be encoded in the guide by placing a cytidine within the guide extension across from the desired adenosine to create a favorable A-C mismatch ideal for ADAR editing activity. Second, Cas13 has no targeting sequence constraints, such as a PFS or PAM, and no motif preference surrounding the target adenosine, allowing any adenosine in the transcriptome to be potentially targeted with the REPAIR system. We do note, however, that DNA base editors can target either the sense or anti-sense strand, while the REPAIR system is limited to transcribed sequences, thereby constraining the total number of possible editing sites we could target. However, due to the more flexible nature of targeting with REPAIR, this system can effect more edits within ClinVar (FIG. 52C) than Cas9-DNA base editors. Third, the REPAIR system directly deaminates target adenosines to inosines and does not rely on endogenous repair pathways, such as base-excision or mismatch repair, to generate desired editing outcomes. Thus, REPAIR should be possible in non-dividing cells that cannot support other forms of editing, such as in post-mitotic cells, such as in neurons. Fourth, RNA editing can be transient, allowing the potential for temporal control over editing outcomes. This property will likely be useful for treating diseases caused by temporary changes in cell state, such as local inflammation.

[1179] The REPAIR system provides multiple opportunities for additional engineering. Cas13b possesses pre-crRNA processing activity(13), allowing for multiplex editing of multiple variants, which alone might not alter disease risk, but together might have additive effects and disease-modifying potential. Extension of our rational design approach, such as combining promising mutations, could further increase the specificity and efficiency of the system, while unbiased screening approaches could identify additional residues for improving REPAIR activity and specificity.

[1180] Currently, the base conversions achievable by REPAIR are limited to generating inosine from adenosine; additional fusions of dCas13 with other catalytic RNA editing domains, such as APOBEC, could enable cytidine to uridine editing. Additionally, mutagenesis of ADAR could relax the substrate preference to target cytidine, allowing for the enhanced specificity conferred by the duplexed RNA substrate requirement to be exploited by C->U editors. Adenosine to inosine editing on DNA substrates may also be possible with catalytically inactive DNA-targeting CRISPR effectors, such as dCas9 or dCpf1, either through formation of DNA-RNA heteroduplex targets(20) or mutagenesis of the ADAR domain.

[1181] REPAIR could be applied towards a range of therapeutic indications where A to I (A to G) editing can reverse or slow disease progression (FIGS. 66A-66G). First, expression of REPAIR for targeting causal, Mendelian G to A mutations in disease-relevant tissues could be used to revert deleterious mutations and treat disease. For example, stable REPAIR expression via AAV in brain tissue could be used to correct the GRIN2A missense mutation c.2191G>A (Asp731Asn) that causes focal epilepsy(28) or the APP missense mutation c.2149G>A (Val717Ile) causing early-onset Alzheimer's disease(29). Second, REPAIR could be used to treat disease by modifying the function of proteins involved in disease-related signal transduction. For instance, REPAIR editing would allow the re-coding of some serine, threonine and tyrosine residues that are the targets of kinases (FIGS. 66A-66G). Phosphorylation of these residues in disease-relevant proteins affects disease progression for many disorders including Alzheimer's disease and multiple neurodegenerative conditions(30). Third, REPAIR could be used to change the sequence of expressed, risk-modifying G to A variants to pre-emptively decrease the chance of entering a disease state for patients. The most intriguing case are the ‘protective’ risk-modifying alleles, which dramatically decrease the chance of entering a disease state, and in some cases, confer additional health benefits. For instance, REPAIR could be used to functionally mimic A to G alleles of PCSK9 and IFIH1 that protect against cardiovascular disease and psoriatic arthritis (31, 39), respectively. Last, REPAIR can be used to therapeutically modify splice acceptor and donor sites for exon modulation therapies. REPAIR can change AU to IU or AA to AI, the functional equivalent of the consensus 5′ splice donor or 3′ splice acceptor sites respectively, creating new splice junctions. Additionally, REPAIR editing can mutate the consensus 3′ splice acceptor site from AG->IG to promote skipping of the adjacent downstream exon, a therapeutic strategy that has received significant interest for the treatment of DMD. Modulation of splice sites could have broad applications in diseases where anti-sense oligos have had some success, such as for modulation of SMN2 splicing for treatment of spinal muscular atrophy(32).

[1182] We have demonstrated the use of the PspCas13b enzyme as both an RNA knockdown and RNA editing tool. The dCas13b platform for programmable RNA binding has many applications, including live transcript imaging, splicing modification, targeted localization of transcripts, pull down of RNA-binding proteins, and epitranscriptomic modifications. Here, we used dCas13 to create REPAIR, adding to the existing suite of nucleic acid editing technologies. REPAIR provides a new approach for treating genetic disease or mimicking protective alleles, and establishes RNA editing as a useful tool for modifying genetic function.

TABLE 6
Cas13 Orthologs used in this study

| Cas13 ID | Cas13 abbreviation | Host Organism | Protein Accession |
|---|---|---|---|
| Cas13a1 | LshCas13a | Leptotrichia shahii | WP_018451595.1 |
| Cas13a2 | LwaCas13a | Leptotrichia wadei (Lw2) | WP_021746774.1 |
| Cas13a3 | LseCas13a | Listeria seeligeri | WP_012985477.1 |
| Cas13a4 | LbmCas13a | Lachnospiraceae bacterium MA2020 | WP_044921188.1 |
| Cas13a5 | LbnCas13a | Lachnospiraceae bacterium NK4A179 | WP_022785443.1 |
| Cas13a6 | CamCas13a | [Clostridium] aminophilum DSM 10710 | WP_031473346.1 |
| Cas13a7 | CgaCas13a | Carnobacterium gallinarum DSM 4847 | WP_034560163.1 |
| Cas13a8 | Cga2Cas13a | Carnobacterium gallinarum DSM 4847 | WP_034563842.1 |
| Cas13a9 | Pprcas13a | Paludibacter propionicigenes WB4 | WP_013443710.1 |
| Cas13a10 | LweCas13a | Listeria weihenstephanensis FSL R9-0317 | WP_036059185.1 |
| Cas13a11 | LbfCas13a | Listeriaceae bacterium FSL M6-0635 | WP_036091002.1 |
| Cas13a12 | Lwa2cas13a | Leptotrichia wadei F0279 | WP_021746774.1 |
| Cas13a13 | RcsCas13a | Rhodobacter capsulatus SB 1003 | WP_013067728.1 |
| Cas13a14 | RcrCas13a | Rhodobacter capsulatus R121 | WP_023911507.1 |
| Cas13a15 | RcdCas13a | Rhodobacter capsulatus DE442 | WP_023911507.1 |
| Cas13a16 | LbuCas13a | Leptotrichia buccalis C-1013-b | WP_015770004.1 |
| Cas13a17 | HheCas13a | Herbinix hemicellulosilytica | CRZ35554.1 |
| Cas13a18 | EreCas13a | [Eubacterium] rectale | WP_055061018.1 |
| Cas13a19 | EbaCas13a | Eubacteriaceae bacterium CHKCI004 | WP_090127496.1 |
| Cas13a20 | BmaCas13a | Blautia sp. Marseille-P2398 | WP_062808098.1 |
| Cas13a21 | LspCas13a | Leptotrichia sp. oral taxon 879 str. F0557 | WP_021744063.1 |
| Cas13b1 | BzoCas13b | Bergeyella zoohelcum | WP_002664492 |
| Cas13b2 | PinCas13b | Prevotella intermedia | WP_036860899 |
| Cas13b3 | PbuCas13b | Prevotella buccae | WP_004343973 |
| Cas13b4 | AspCas13b | Alistipes sp. ZOR0009 | WP_047447901 |
| Cas13b5 | PsmCas13b | Prevotella sp. MA2016 | WP_036929175 |
| Cas13b6 | RanCas13b | Riemerella anatipestifer | WP_004919755 |
| Cas13b7 | PauCas13b | Prevotella aurantiaca | WP_025000926 |
| Cas13b8 | PsaCas13b | Prevotella saccharolytica | WP_051522484 |
| Cas13b9 | Pin2Cas13b | Prevotella intermedia | WP_061868553 |
| Cas13b10 | CcaCas13b | Capnocytophaga canimorsus | WP_013997271 |
| Cas13b11 | PguCas13b | Porphyromonas gulae | WP_039434803 |
| Cas13b12 | PspCas13b | Prevotella sp. P5-125 | WP_044065294 |
| Cas13b13 | FbrCas13b | Flavobacterium branchiophilum | WP_014084666 |
| Cas13b14 | PgiCas13b | Porphyromonas gingivalis | WP_053444417 |
| Cas13b15 | Pin3Cas13b | Prevotella intermedia | WP_050955369 |
| Cas13c1 | FnsCas13c | Fusobacterium necrophorum subsp. funduliforme | WP_005959231.1 |
| | | ATCC 51357 contig00003 | |
| Cas13c2 | FndCas13c | Fusobacterium necrophorum DJ-2 contig0065, | WP_035906563.1 |
| | | whole genome shotgun sequence | |
| Cas13c3 | FnbCas13c | Fusobacterium necrophorum BFTR-1 contig0068 | WP_035935671.1 |
| Cas13c4 | FnfCas13c | Fusobacterium necrophorum subsp. funduliforme | EHO19081.1 |
| | | 1_1_36S cont1.14 | |
| Cas13c5 | FpeCas13c | Fusobacterium perfoetens ATCC 29250 | WP_027128616.1 |
| | | T364DRAFT_scaffold00009.9_C | |
| Cas13c6 | FulCas13c | Fusobacterium ulcerans ATCC 49185 cont2.38 | WP_040490876.1 |
| Cas13c7 | AspCas13c | Anaerosalibacter sp. ND1 genome assembly | WP_042678931.1 |
| | | Anaerosalibacter massiliensis ND1 | |

TABLE 7
PFS cutoffs in bacterial screens

| | | −Log₂ depletion |
|---|---|---|
| | | score used to |
| Cas13b ortholog | Key | generate PFS motif |
| Bergeyella zoohelcum | 1 | 2 |
| Prevotella intermedia locus 1 | 2 | 1 |
| Prevotella buccae | 3 | 3 |
| Alistipes sp. ZOR0009 | 4 | 1 |
| Prevotella sp. MA2016 | 5 | 2 |
| Riemerella anatipestifer | 6 | 4 |
| Prevotella aurantiaca | 7 | 1 |
| Prevotella saccharolytica | 8 | 0 |
| Prevotella intermedia locus 2 | 9 | 0 |
| Capnocytophaga canimorsus | 10 | 3 |
| Porphyromonas gulae | 11 | 4 |
| Prevotella sp. P5-125 | 12 | 2.1 |
| Flavobacterium branchiophilum | 13 | 1 |
| Porphyromonas gingivalis | 14 | 3 |
| Prevotella intermedia locus 2 | 15 | 4 |

TABLE 8
dCas13b-ADAR linker sequences used in this
study for RNA editing in mammalian cells.

| Figure | linker |
|---|---|
| 50C | GSGGGGS |
| (SEQ ID NO: 830) | |
| 50E | GS |
| 57B | GSGGGGS |
| 57C | GS |
| 57D | GS |
| 57E: GS | GS |
| 57E: GSGGGGS | GSGGGGS |
| 57E: (GGGS)3 | GGGGSGGGGSGGGGS |
| (SEQ ID NO: 831) | |
| 57E: Rigid | EAAAK |
| (SEQ ID NO: 832) | |
| 57E: (GGS)6 | GGSGGSGGSGGSGGSGGS |
| (SEQ ID NO: 833) | |
| 57E: XTEN | SGSETPGTSESATPES |
| (SEQ ID NO: 834) | |
| 51B | GS |
| 57F | GS |
| 51C | GS |
| 52B | GS |
| 52D | GS |
| 52E | GS |
| 51A: Δ984-1090, Δ1026-1090, | GS |
| Δ1053-1090 | |
| 51A: Δ1-125, Δ1-88, Δ1-72 | GSGGGGS |
| 53B | GS |
| 53C | GS |
| 53D | GS |
| 60A | GS |
| 60C | GS |
| 60D | GS |
| 61D | GS |
| 54A | GS |
| 62A | GS |
| 54B | GS |
| 62B | GS |
| 62C | GS |
| 63A | GS |
| 63B | GS |
| 54C | GS |
| 54D | GS |
| 54E | GS |
| 54F | GS |
| 66A | GS |
| 66A | GS |

TABLE 9
Disease information for disease-relevant mutations

| | Gene | Disease |
|---|---|---|
| Full length candidates | | |
| NM_000054.4(AVPR2): c.878G > A (p.Trp293Ter) | AVPR2 | Nephrogenic diabetes insipidus, X-linked |
| NM_000136.2(FANCC): c.1517G > A (p.Trp506Ter) | FANCC | Fanconi anemia, complementation group C |
| Additional simulated candiates | | |
| NM_000206.2(IL2RG): c.710G > A (p.Trp237Ter) | IL2RG | X-linked severe combined immunodeficiency |
| NM_000132.3(F8): c.3144G > A (p.Trp1048Ter) | F8 | Hereditary factor VIII deficiency disease |
| NM_000527.4(LDLR): c.1449G > A (p.Trp483Ter) | LDLR | Familial hypercholesterolemia |
| NM_000071.2(CBS): c.162G > A (p.Trp54Ter) | CBS | Homocystinuria due to CBS deficiency |
| NM_000518.4(HBB): c.114G > A (p.Trp38Ter) | HBB | beta\hat{ }0\hat{ } Thalassemia\|beta Thalassemia |
| NM_000035.3(ALDOB): c.888G > A (p.Trp296Ter) | ALDOB | Hereditary fructosuria |
| NM_004006.2(DMD): c.3747G > A (p.Trp1249Ter) | DMD | Duchenne muscular dystrophy |
| NM_005359.5(SMAD4): c.906G > A (p.Trp302Ter) | SMAD4 | Juvenile polyposis syndrome |
| NM_000059.3(BRCA2): c.582G > A (p.Trp194Ter) | BRCA2 | Familial cancer of breast\|Breast-ovarian |
| | | cancer, familial 2 |
| NM_000833.4(GRIN2A): c.3813G > A (p.Trp1271Ter) | GRIN2A | Epilepsy, focal, with speech disorder and |
| | | with or without mental retardation |
| NM_002977.3(SCN9A): c.2691G > A (p.Trp897Ter) | SCN9A | Indifference to pain, congenital, autosomal |
| | | recessive |
| NM_007375.3(TARDBP): c.943G > A (p.Ala315Thr) | TARDBP | Amyotrophic lateral sclerosis type 10 |
| NM_000492.3(CFTR): c.3846G > A (p.Trp1282Ter) | CFTR | Cystic fibrosis\|Hereditary |
| | | pancreatitis not\|provided |
| | | ataluren response -Efficacy |
| NM_130838.1(UBE3A): c.2304G > A (p.Trp768Ter) | UBE3A | Angelman syndrome |
| NM_000543.4(SMPD1): c.168G > A (p.Trp56Ter) | SMPD1 | Niemann-Pick disease, type A |
| NM_206933.2(USH2A): c.9390G > A (p.Trp3130Ter) | USH2A | Usher syndrome, type 2A |
| NM_130799.2(MEN1): c.1269G > A (p.Trp423Ter) | MEN1 | Hereditary cancer-predisposing syndrome |
| NM_177965.3(C8orf37): c.555G > A (p.Trp185Ter) | C8orf37 | Retinitis pigmentosa 64 |
| NM_000249.3(MLH1): c.1998G > A (p.Trp666Ter) | MLH1 | Lynch syndrome |
| NM_000548.4(TSC2): c.2108G > A (p.Trp703Ter) | TSC2 | Tuberous sclerosis 2\|Tuberous sclerosis |
| | | syndrome |
| NM_000267.3(NF1): c.7044G > A (p.Trp2348Ter) | NF1 | Neurofibromatosis, type 1 |
| NM_000179.2(MSH6): c.3020G > A (p.Trp1007Ter) | MSH6 | Lynch syndrome |
| NM_000344.3(SMN1): c.305G > A (p.Trp102Ter) | SMN1 | Spinal muscular atrophy, |
| | | type II\|Kugelberg-Welander disease |
| NM_024577.3(SH3TC2): c.920G > A (p.Trp307Ter) | SH3TC2 | Charcot-Marie-Tooth disease, type 4C |
| NM_001369.2(DNAH5): c.8465G > A (p.Trp2822Ter) | DNAH5 | Primary ciliary dyskinesia |
| NM_004992.3(MECP2): c.311G > A (p.Trp104Ter) | MECP2 | Rett syndrome |
| NM_032119.3(ADGRV1): c.7406G > A (p.Trp2469Ter) | ADGRV1 | Usher syndrome, type 2C |
| NM_017651.4(AHI1): c.2174G > A (p.Trp725Ter) | AHI1 | Joubert syndrome 3 |
| NM_004562.2(PRKN): c.1358G > A (p.Trp453Ter) | PRKN | Parkinson disease 2 |
| NM_000090.3(COL3A1): c.3833G > A (p.Trp1278Ter) | COL3A1 | Ehlers-Danlos syndrome, type 4 |
| NM_007294.3(BRCA1): c.5511G > A (p.Trp1837Ter) | BRCA1 | Familial cancer of breast\|Breast-ovarian |
| | | cancer, familial 1 |
| NM_000256.3(MYBPC3): c.3293G > A (p.Trp1098Ter) | MYBPC3 | Primary familial hypertrophic cardiomyopathy |
| NM_000038.5(APC): c.1262G > A (p.Trp421Ter) | APC | Familial adenomatous polyposis 1 |
| NM_001204.6(BMPR2): c.893G > A (p.W298*) | BMPR2 | Primary pulmonary hypertension |

TABLE 10
Key plasmids used in this study

| Plasmid name | Description |
|---|---|
| pAB0006 | CMV-Cluciferase-polyA EF1a-G- |
| | luciferase-poly A |
| pAB0040 | CMV-Cluciferase(STOP85)-polyA EF1a- |
| | G-luciferase-polyA |
| pAB0048 | pCDNA-ADAR2-N-terminal B12-HIV NES |
| pAB0050 | pAB0001-A02 (crRNA backbone) |
| pAB0051 | pAB0001-B06 (crRNA backbone) |
| pAB0052 | pAB0001-B11 (crRNA backbone) |
| pAB0053 | pAB0001-B12 (crRNA backbone) |
| pAB0014.B6 | EF1a-BsiWI-Cas13b6-NES-mapk |
| pAB0013.B11 | EF1a-BsiWI-Cas13b11-NES-HIV |
| pAB0013.B12 | EF1a-BsiWI-Cas13b12-NES-HIV |
| pAB0051 | pAB0001-B06 (crRNA backbone) |
| pAB0052 | pAB0001-B11 (crRNA backbone) |
| pAB0053 | pAB0001-B12 (crRNA backbone) |
| pAB0079 | pCDNA-ADAR1hu-EQmutant-N-terminal |
| | destination vector |
| pAB0085 | pCDNA-ADAR2 (E488Q)hu-EQmutant-N- |
| | terminal destination vector |
| pAB0095 | EF1a-BsiWI-Cas13-B12-NES-HIV, with |
| | double H HEPN mutant |
| pAB0114 | pCDNA-wtADAR2hu-EQmutant-N-terminal |
| | destination vector |
| pAB0120 | Luciferase ADAR guide optimal |
| | (guide 24 from wC0054) |
| pAB0122 | pAB0001-B12 NT guide for ADAR experiments |
| pAB0151 | pCDNA-ADAR2hu-EQmutant-N-terminal |
| | destination vector C-term delta 984-1090 |
| pAB0180 | T375G specificity mutant |
| pAB0181 | T375G Cas13b C-term delta 984-1090 |

TABLE 11
Guide/shRNA sequences used in this study for knockdown
in mammalian cells

| | | Inter- | | |
|---|---|---|---|---|
| | | ference | | First |
| Name | Spacer sequence | Mechanism | Notes | figure |
| Bacterial | GCCAGCUUUCCGGGCAUU | Cas13b | Used for all | |
| PFS | GGCUUCCAUC | | orthologs | |
| guide | (SEQ ID No. 300) | | | |
| Cas13a- | GCCAGCUUUCCGGGCAUU | Cas13a | Used for all | FIG. 49B |
| Gluc | GGCUUCCAUC | | Cas13a | |
| guide 1 | (SEQ ID No. 301) | | orthologs | |
| Cas13a- | ACCCAGGAAUCUCAGGAA | Cas13a | Used for all | FIG. 49B |
| Gluc | UGUCGACGAU | | Cas13a | |
| guide 2 | (SEQ ID No. 302) | | orthologs | |
| Cas13a- | AGGGUUUUCCCAGUCACG | Cas13a | Used for all | FIG. 49B |
| non- | ACGUUGUAAA | | Cas13a | |
| targeting | (SEQ ID No. 303) | | orthologs | |
| guide | | | | |
| (LacZ) | | | | |
| Cas13b- | GGGCAUUGGCUUCCAUCU | Cas13b | Used for | FIG. 49B |
| Gluc | CUUUGAGCACCU | | orthologs 1-3, | |
| guide 1.1 | (SEQ ID No. 304) | | 6, 7, 10, 11, | |
| | | | 12, 14, 15 | |
| Cas13b- | GUGCAGCCAGCUUUCCGG | Cas13b | Used for | FIG. 49B |
| Gluc | GCAUUGGCUUCC | | ortholog 4 | |
| guide 1.2 | (SEQ ID No. 305) | | | |
| Cas13b- | GCAGCCAGCUUUCCGGGC | Cas13b | Used for | FIG. 49B |
| Gluc | AUUGGCUUCCAU | | ortholog 5 | |
| guide 1.3 | (SEQ ID No. 306) | | | |
| Cas13b- | GGCUUCCAUCUCUUUGAG | Cas13b | Used for | FIG. 49B |
| Gluc | CACCUCCAGCGG | | ortholog 8, 9 | |
| guide 1.4 | (SEQ ID No. 307) | | | |
| Cas13b- | GGAAUGUCGACGAUCGCC | Cas13b | Used for | FIG. 49B |
| Gluc | UCGCCUAUGCCG | | ortholog 13 | |
| guide 1.5 | (SEQ ID No. 308) | | | |
| Cas13b- | GAAUGUCGACGAUCGCCU | Cas13b | Used for | FIG. 49B |
| Gluc | CGCCUAUGCCGC | | orthologs 1-3, | |
| guide 2.1 | (SEQ ID No. 309) | | 6, 7, 10, 11, | |
| | | | 14, 15 | |
| Cas13b- | GACCUGUGCGAUGAACUG | Cas13b | Used for | FIG. 49B |
| Gluc | CUCCAUGGGCUC | | ortholog 12 | |
| guide 2.2 | (SEQ ID No. 310) | | | |
| Cas13b- | GUGUGGCAGCGUCCUGGG | Cas13b | Used for | FIG. 49B |
| Gluc | AUGAACUUCUUC | | ortholog 4 | |
| guide 2.2 | (SEQ ID No. 311) | | | |
| Cas13b- | GUGGCAGCGUCCUGGGAU | Cas13b | Used for | FIG. 49B |
| Gluc | GAACUUCUUCAU | | ortholog 5 | |
| guide 2.3 | (SEQ ID No. 312) | | | |
| Cas13b- | GCUUCUUGCCGGGCAACU | Cas13b | Used for | FIG. 49B |
| Gluc | UCCCGCGGUCAG | | ortholog 8, 9 | |
| guide 2.4 | (SEQ ID No. 313) | | | |
| Cas13b- | GCAGGGUUUUCCCAGUCA | Cas13b | Used for | FIG. 49B |
| Gluc | CGACGUUGUAAAA | | ortholog 13 | |
| guide 2.6 | (SEQ ID No. 314) | | | |
| Cas13b- | GCAGGGUUUUCCCAGUCA | Cas13b | Used for all | FIG. 49B |
| non | CGACGUUGUAAAA | | orthologs | |
| targeting | (SEQ ID No. 315) | | | |
| guide | | | | |
| Cas13a- | ACCCAGGAAUCUCAGGAA | Cas13a | | FIG. 49E |
| Gluc | UGUCGACGAU | | | |
| guide- | (SEQ ID No. 316) | | | |
| RNASeq | | | | |
| shRNA- | CAGCUUUCCGGGCAUUGG | shRNA | | FIG. 49F |
| Gluc | CUU | | | |
| guide | (SEQ ID No. 317) | | | |
| Cas13b- | CCGCUGGAGGUGCUCAAA | Cas13b | | FIG. 49F |
| Gluc | GAGAUGGAAGCC | | | |
| guide- | (SEQ ID No. 318) | | | |
| RNASeq | | | | |
| Cas13a- | GCCAGCUUUCCGGGCAUU | Cas13a | | FIG. 56A |
| Gluc- | GGCUUCCAUC | | | |
| guide-1 | (SEQ ID No. 319) | | | |
| Cas13a- | ACCCAGGAAUCUCAGGAA | Cas13a | | FIG. 56A |
| Gluc- | UGUCGACGAU | | | |
| guide-2 | (SEQ ID No. 320) | | | |
| Cas13b- | GGGCAUUGGCUUCCAUCU | Cas13b | | FIG. 56A |
| Gluc- | CUUUGAGCACCU | | | |
| opt- | (SEQ ID No. 321) | | | |
| guide-1 | | | | |
| Cas13b- | GAAUGUCGACGAUCGCCU | Cas13b | | FIG. 56A |
| Gluc- | CGCCUAUGCCGC | | | |
| opt- | (SEQ ID No. 322) | | | |
| guide-2 | | | | |
| Cas13a | CAAGGCACUCUUGCCUAC | Cas13a | | FIG. 56B |
| KRAS | GCCACCAGCU | | | |
| guide 1 | (SEQ ID No. 323) | | | |
| Cas13a | UCAUAUUCGUCCACAAAA | Cas13a | | FIG. 56B |
| KRAS | UGAUUCUGAA | | | |
| guide 2 | (SEQ ID No. 324) | | | |
| Cas13a | AUUAUUUAUGGCAAAUAC | Cas13a | | FIG. 56B |
| KRAS | ACAAAGAAAG | | | |
| guide 3 | (SEQ ID No. 325) | | | |
| Cas13a | GAAUAUCUUCAAAUGAUU | Cas13a | | FIG. 56B |
| KRAS | UAGUAUUAUU | | | |
| guide 4 | (SEQ ID No. 326) | | | |
| Cas13a | ACCAUAGGUACAUCUUCA | Cas13a | | FIG. 56B |
| KRAS | GAGUCCUUAA | | | |
| guide 5 | (SEQ ID No. 327) | | | |
| Cas13b | GUCAAGGCACUCUUGCCU | Cas13b | | FIG. 56B |
| KRAS | ACGCCACCAGCU | | | |
| guide 1 | (SEQ ID No. 328) | | | |
| Cas13b | GAUCAUAUUCGUCCACAA | Cas13b | | FIG. 56B |
| KRAS | AAUGAUUCUGAA | | | |
| guide 2 | (SEQ ID No. 329) | | | |
| Cas13b | GUAUUAUUUAUGGCAAAU | Cas13b | | FIG. 56B |
| KRAS | ACACAAAGAAAG | | | |
| guide 3 | (SEQ ID No. 330) | | | |
| Cas13b | GUGAAUAUCUUCAAAUGA | Cas13b | | FIG. 56B |
| KRAS | UUUAGUAUUAUU | | | |
| guide 4 | (SEQ ID No. 331) | | | |
| Cas13b | GGACCAUAGGUACAUCUU | Cas13b | | FIG. 56B |
| KRAS | CAGAGUCCUUAA | | | |
| guide 5 | (SEQ ID No. 332) | | | |
| shRNA | aagagtgccttgacgatacagcCUCGA | shRNA | | FIG. 56B |
| KRAS | Ggctgtatcgtcaaggcactctt | | | |
| guide 1 | (SEQ ID No. 333) | | | |
| shRNA | aatcattttgtggacgaatatCUCGAGa | shRNA | | FIG. 56B |
| KRAS | tattcgtccacaaaatgatt | | | |
| guide 2 | (SEQ ID No. 334) | | | |
| shRNA | aaataatactaaatcatttgaCUCGAGt | shRNA | | FIG. 56B |
| KRAS | caaatgatttagtattattt | | | |
| guide 3 | (SEQ ID No. 335) | | | |
| shRNA | aataatactaaatcatttgaaCUCGAGtt | shRNA | | FIG. 56B |
| KRAS | caaatgatttagtattatt | | | |
| guide 4 | (SEQ ID No. 336) | | | |
| shRNA | aaggactctgaagatgtacctCUCGAG | shRNA | | FIG. 56B |
| KRAS | aggtacatcttcagagtcctt | | | |
| guide 5 | (SEQ ID No. 337) | | | |

TABLE 12
Guide sequences used for Gluc knockdown

| | | | | First |
|---|---|---|---|---|
| Name | Spacer sequence | Position | Notes | figure |
| Gluc tiling | GAGAUCAGGGCAAACA | 2 | Note that the Cas13a spacers | 49C |
| guide 1 | GAACUUUGACUCCC | | are truncated by two | |
| | (SEQ ID No. 338) | | nucleotides at the 5′ end | |
| Gluc tiling | GGAUGCAGAUCAGGGC | 7 | Note that the Cas13a spacers | 49C |
| guide 2 | AAACAGAACUUUGA | | are truncated by two | |
| | (SEQ ID No. 339) | | nucleotides at the 5′ end | |
| Gluc tiling | GCACAGCGAUGCAGAU | 13 | Note that the Cas13a spacers | 49C |
| guide 3 | CAGGGCAAACAGAA | | are truncated by two | |
| | (SEQ ID No. 340) | | nucleotides at the 5′ end | |
| Gluc tiling | GCUCGGCCACAGCGAU | 19 | Note that the Cas13a spacers | 49C |
| guide 4 | GCAGAUCAGGGCAA | | are truncated by two | |
| | (SEQ ID No. 341) | | nucleotides at the 5′ end | |
| Gluc tiling | GGGGCUUGGCCUCGGC | 28 | Note that the Cas13a spacers | 49C |
| guide 5 | CACAGCGAUGCAGA | | are truncated by two | |
| | (SEQ ID No. 342) | | nucleotides at the 5′ end | |
| Gluc tiling | GUGGGCUUGGCCUCGG | 29 | Note that the Cas13a spacers | 49C |
| guide 6 | CCACAGCGAUGCAG | | are truncated by two | |
| | (SEQ ID No. 343) | | nucleotides at the 5′ end | |
| Gluc tiling | GUCUCGGUGGGCUUGG | 35 | Note that the Cas13a spacers | 49C |
| guide 7 | CCUCGGCCACAGCG | | are truncated by two | |
| | (SEQ ID No. 344) | | nucleotides at the 5′ end | |
| Gluc tiling | GUUCGUUGUUCUCGGU | 43 | Note that the Cas13a spacers | 49C |
| guide 8 | GGGCUUGGCCUCGG | | are truncated by two | |
| | (SEQ ID No. 345) | | nucleotides at the 5′ end | |
| Gluc tiling | GGAAGUCUUCGUUGUU | 49 | Note that the Cas13a spacers | 49C |
| guide 9 | CUCGGUGGGCUUGG | | are truncated by two | |
| | (SEQ ID No. 346) | | nucleotides at the 5′ end | |
| Gluc tiling | GAUGUUGAAGUCUUCG | 54 | Note that the Cas13a spacers | 49C |
| guide 10 | UUGUUCUCGGUGGG | | are truncated by two | |
| | (SEQ ID No. 347) | | nucleotides at the 5′ end | |
| Gluc tiling | GCGGCCACGAUGUUGA | 62 | Note that the Cas13a spacers | 49C |
| guide 11 | AGUCUUCGUUGUUC | | are truncated by two | |
| | (SEQ ID No. 348) | | nucleotides at the 5′ end | |
| Gluc tiling | GUGGCCACGGCCACGA | 68 | Note that the Cas13a spacers | 49C |
| guide 12 | UGUUGAAGUCUUCG | | are truncated by two | |
| | (SEQ ID No. 349) | | nucleotides at the 5′ end | |
| Gluc tiling | GGUUGCUGGCCACGGC | 73 | Note that the Cas13a spacers | 49C |
| guide 13 | CACGAUGUUGAAGU | | are truncated by two | |
| | (SEQ ID No. 350) | | nucleotides at the 5′ end | |
| Gluc tiling | GUCGCGAAGUUGCUGG | 80 | Note that the Cas13a spacers | 49C |
| guide 14 | CCACGGCCACGAUG | | are truncated by two | |
| | (SEQ ID No. 351) | | nucleotides at the 5′ end | |
| Gluc tiling | GCCGUGGUCGCGAAGU | 86 | Note that the Cas13a spacers | 49C |
| guide 15 | UGCUGGCCACGGCC | | are truncated by two | |
| | (SEQ ID No. 352) | | nucleotides at the 5′ end | |
| Gluc tiling | GCGAGAUCCGUGGUCG | 92 | Note that the Cas13a spacers | 49C |
| guide 16 | CGAAGUUGCUGGCC | | are truncated by two | |
| | (SEQ ID No. 353) | | nucleotides at the 5′ end | |
| Gluc tiling | GCAGCAUCGAGAUCCG | 98 | Note that the Cas13a spacers | 49C |
| guide 17 | UGGUCGCGAAGUUG | | are truncated by two | |
| | (SEQ ID No. 354) | | nucleotides at the 5′ end | |
| Gluc tiling | GGGUCAGCAUCGAGAU | 101 | Note that the Cas13a spacers | 49C |
| guide 18 | CCGUGGUCGCGAAG | | are truncated by two | |
| | (SEQ ID No. 355) | | nucleotides at the 5′ end | |
| Gluc tiling | GCUUCCCGCGGUCAGC | 109 | Note that the Cas13a spacers | 49C |
| guide 19 | AUCGAGAUCCGUGG | | are truncated by two | |
| | (SEQ ID No. 356) | | nucleotides at the 5′ end | |
| Gluc tiling | GGGGCAACUUCCCGCG | 115 | Note that the Cas13a spacers | 49C |
| guide 20 | GUCAGCAUCGAGAU | | are truncated by two | |
| | (SEQ ID No. 357) | | nucleotides at the 5′ end | |
| Gluc tiling | GUCUUGCCGGGCAACU | 122 | Note that the Cas13a spacers | 49C |
| guide 21 | UCCCGCGGUCAGCA | | are truncated by two | |
| | (SEQ ID No. 358) | | nucleotides at the 5′ end | |
| Gluc tiling | GGCAGCUUCUUGCCGG | 128 | Note that the Cas13a spacers | 49C |
| guide 22 | GCAACUUCCCGCGG | | are truncated by two | |
| | (SEQ ID No. 359) | | nucleotides at the 5′ end | |
| Gluc tiling | GCCAGCGGCAGCUUCU | 134 | Note that the Cas13a spacers | 49C |
| guide 23 | UGCCGGGCAACUUC | | are truncated by two | |
| | (SEQ ID No. 360) | | nucleotides at the 5′ end | |
| Gluc tiling | GCACCUCCAGCGGCAG | 139 | Note that the Cas13a spacers | 49C |
| guide 24 | CUUCUUGCCGGGCA | | are truncated by two | |
| | (SEQ ID No. 361) | | nucleotides at the 5′ end | |
| Gluc tiling | GCUUUGAGCACCUCCA | 146 | Note that the Cas13a spacers | 49C |
| guide 25 | GCGGCAGCUUCUUG | | are truncated by two | |
| | (SEQ ID No. 362) | | nucleotides at the 5′ end | |
| Gluc tiling | GCAUCUCUUUGAGCAC | 151 | Note that the Cas13a spacers | 49C |
| guide 26 | CUCCAGCGGCAGCU | | are truncated by two | |
| | (SEQ ID No. 363) | | nucleotides at the 5′ end | |
| Gluc tiling | GUCCAUCUCUUUGAGC | 153 | Note that the Cas13a spacers | 49C |
| guide 27 | ACCUCCAGCGGCAG | | are truncated by two | |
| | (SEQ ID No. 364) | | nucleotides at the 5′ end | |
| Gluc tiling | GGGCAUUGGCUUCCAU | 163 | Note that the Cas13a spacers | 49C |
| guide 28 | CUCUUUGAGCACCU | | are truncated by two | |
| | (SEQ ID No. 365) | | nucleotides at the 5′ end | |
| Gluc tiling | GUCCGGGCAUUGGCUU | 167 | Note that the Cas13a spacers | 49C |
| guide 29 | CCAUCUCUUUGAGC | | are truncated by two | |
| | (SEQ ID No. 366) | | nucleotides at the 5′ end | |
| Gluc tiling | GGCCAGCUUUCCGGGC | 175 | Note that the Cas13a spacers | 49C |
| guide 30 | AUUGGCUUCCAUCU | | are truncated by two | |
| | (SEQ ID No. 367) | | nucleotides at the 5′ end | |
| Gluc tiling | GGGUGCAGCCAGCUUU | 181 | Note that the Cas13a spacers | 49C |
| guide 31 | CCGGGCAUUGGCUU | | are truncated by two | |
| | (SEQ ID No. 368) | | nucleotides at the 5′ end | |
| Gluc tiling | GAGCCCCUGGUGCAGC | 188 | Note that the Cas13a spacers | 49C |
| guide 32 | CAGCUUUCCGGGCA | | are truncated by two | |
| | (SEQ ID No. 369) | | nucleotides at the 5′ end | |
| Gluc tiling | GAUCAGACAGCCCCUG | 195 | Note that the Cas13a spacers | 49C |
| guide 33 | GUGCAGCCAGCUUU | | are truncated by two | |
| | (SEQ ID No. 370) | | nucleotides at the 5′ end | |
| Gluc tiling | GGCAGAUCAGACAGCC | 199 | Note that the Cas13a spacers | 49C |
| guide 34 | CCUGGUGCAGCCAG | | are truncated by two | |
| | (SEQ ID No. 371) | | nucleotides at the 5′ end | |
| Gluc tiling | GACAGGCAGAUCAGAC | 203 | Note that the Cas13a spacers | 49C |
| guide 35 | AGCCCCUGGUGCAG | | are truncated by two | |
| | (SEQ ID No. 372) | | nucleotides at the 5′ end | |
| Gluc tiling | GUGAUGUGGGACAGGC | 212 | Note that the Cas13a spacers | 49C |
| guide 36 | AGAUCAGACAGCCC | | are truncated by two | |
| | (SEQ ID No. 373) | | nucleotides at the 5′ end | |
| Gluc tiling | GACUUGAUGUGGGACA | 215 | Note that the Cas13a spacers | 49C |
| guide 37 | GGCAGAUCAGACAG | | are truncated by two | |
| | (SEQ ID No. 374) | | nucleotides at the 5′ end | |
| Gluc tiling | GGGGCGUGCACUUGAU | 223 | Note that the Cas13a spacers | 49C |
| guide 38 | GUGGGACAGGCAGA | | are truncated by two | |
| | (SEQ ID No. 375) | | nucleotides at the 5′ end | |
| Gluc tiling | GCUUCAUCUUGGGCGU | 232 | Note that the Cas13a spacers | 49C |
| guide 39 | GCACUUGAUGUGGG | | are truncated by two | |
| | (SEQ ID No. 376) | | nucleotides at the 5′ end | |
| Gluc tiling | GUGAACUUCUUCAUCU | 239 | Note that the Cas13a spacers | 49C |
| guide 40 | UGGGCGUGCACUUG | | are truncated by two | |
| | (SEQ ID No. 377) | | nucleotides at the 5′ end | |
| Gluc tiling | GGGAUGAACUUCUUCA | 242 | Note that the Cas13a spacers | 49C |
| guide 41 | UCUUGGGCGUGCAC | | are truncated by two | |
| | (SEQ ID No. 378) | | nucleotides at the 5′ end | |
| Gluc tiling | GUGGGAUGAACUUCUU | 244 | Note that the Cas13a spacers | 49C |
| guide 42 | CAUCUUGGGCGUGC | | are truncated by two | |
| | (SEQ ID No. 379) | | nucleotides at the 5′ end | |
| Gluc tiling | GGGCAGCGUCCUGGGA | 254 | Note that the Cas13a spacers | 49C |
| guide 43 | UGAACUUCUUCAUC | | are truncated by two | |
| | (SEQ ID No. 380) | | nucleotides at the 5′ end | |
| Gluc tiling | GGGUGUGGCAGCGUCC | 259 | Note that the Cas13a spacers | 49C |
| guide 44 | UGGGAUGAACUUCU | | are truncated by two | |
| | (SEQ ID No. 381) | | nucleotides at the 5′ end | |
| Gluc tiling | GUUCGUAGGUGUGGCA | 265 | Note that the Cas13a spacers | 49C |
| guide 45 | GCGUCCUGGGAUGA | | are truncated by two | |
| | (SEQ ID No. 382) | | nucleotides at the 5′ end | |
| Gluc tiling | GCGCCUUCGUAGGUGU | 269 | Note that the Cas13a spacers | 49C |
| guide 46 | GGCAGCGUCCUGGG | | are truncated by two | |
| | (SEQ ID No. 383) | | nucleotides at the 5′ end | |
| Gluc tiling | GUCUUUGUCGCCUUCG | 276 | Note that the Cas13a spacers | 49C |
| guide 47 | UAGGUGUGGCAGCG | | are truncated by two | |
| | (SEQ ID No. 384) | | nucleotides at the 5′ end | |
| Gluc tiling | GCUUUGUCGCCUUCGU | 275 | Note that the Cas13a spacers | 49C |
| guide 48 | AGGUGUGGCAGCGU | | are truncated by two | |
| | (SEQ ID No. 385) | | nucleotides at the 5′ end | |
| Gluc tiling | GUGCCGCCCUGUGCGG | 293 | Note that the Cas13a spacers | 49C |
| guide 49 | ACUCUUUGUCGCCU | | are truncated by two | |
| | (SEQ ID No. 386) | | nucleotides at the 5′ end | |
| Gluc tiling | GUAUGCCGCCCUGUGC | 295 | Note that the Cas13a spacers | 49C |
| guide 50 | GGACUCUUUGUCGC | | are truncated by two | |
| | (SEQ ID No. 387) | | nucleotides at the 5′ end | |
| Gluc tiling | GCCUCGCCUAUGCCGC | 302 | Note that the Cas13a spacers | 49C |
| guide 51 | CCUGUGCGGACUCU | | are truncated by two | |
| | (SEQ ID No. 388) | | nucleotides at the 5′ end | |
| Gluc tiling | GGAUCGCCUCGCCUAU | 307 | Note that the Cas13a spacers | 49C |
| guide 52 | GCCGCCCUGUGCGG | | are truncated by two | |
| | (SEQ ID No. 389) | | nucleotides at the 5′ end | |
| Gluc tiling | GAUGUCGACGAUCGCC | 315 | Note that the Cas13a spacers | 49C |
| guide 53 | UCGCCUAUGCCGCC | | are truncated by two | |
| | (SEQ ID No. 390) | | nucleotides at the 5′ end | |
| Gluc tiling | GCAGGAAUGUCGACGA | 320 | Note that the Cas13a spacers | 49C |
| guide 54 | UCGCCUCGCCUAUG | | are truncated by two | |
| | (SEQ ID No. 391) | | nucleotides at the 5′ end | |
| Gluc tiling | GAAUCUCAGGAAUGUC | 325 | Note that the Cas13a spacers | 49C |
| guide 55 | GACGAUCGCCUCGC | | are truncated by two | |
| | (SEQ ID No. 392) | | nucleotides at the 5′ end | |
| Gluc tiling | GCCCAGGAAUCUCAGG | 331 | Note that the Cas13a spacers | 49C |
| guide 56 | AAUGUCGACGAUCG | | are truncated by two | |
| | (SEQ ID No. 393) | | nucleotides at the 5′ end | |
| Gluc tiling | GCCUUGAACCCAGGAA | 338 | Note that the Cas13a spacers | 49C |
| guide 57 | UCUCAGGAAUGUCG | | are truncated by two | |
| | (SEQ ID No. 394) | | nucleotides at the 5′ end | |
| Gluc tiling | GCCAAGUCCUUGAACC | 344 | Note that the Cas13a spacers | 49C |
| guide 58 | CAGGAAUCUCAGGA | | are truncated by two | |
| | (SEQ ID No. 395) | | nucleotides at the 5′ end | |
| Gluc tiling | GUGGGCUCCAAGUCCU | 350 | Note that the Cas13a spacers | 49C |
| guide 59 | UGAACCCAGGAAUC | | are truncated by two | |
| | (SEQ ID No. 396) | | nucleotides at the 5′ end | |
| Gluc tiling | GCCAUGGGCUCCAAGU | 353 | Note that the Cas13a spacers | 49C |
| guide 60 | CCUUGAACCCAGGA | | are truncated by two | |
| | (SEQ ID No. 397) | | nucleotides at the 5′ end | |
| Gluc tiling | GGAACUGCUCCAUGGG | 361 | Note that the Cas13a spacers | 49C |
| guide 61 | CUCCAAGUCCUUGA | | are truncated by two | |
| | (SEQ ID No. 398) | | nucleotides at the 5′ end | |
| Gluc tiling | GUGCGAUGAACUGCUC | 367 | Note that the Cas13a spacers | 49C |
| guide 62 | CAUGGGCUCCAAGU | | are truncated by two | |
| | (SEQ ID No. 399) | | nucleotides at the 5′ end | |
| Gluc tiling | GGACCUGUGCGAUGAA | 373 | Note that the Cas13a spacers | 49C |
| guide 63 | CUGCUCCAUGGGCU | | are truncated by two | |
| | (SEQ ID No. 400) | | nucleotides at the 5′ end | |
| Gluc tiling | GACAGAUCGACCUGUG | 380 | Note that the Cas13a spacers | 49C |
| guide 64 | CGAUGAACUGCUCC | | are truncated by two | |
| | (SEQ ID No. 401) | | nucleotides at the 5′ end | |
| Gluc tiling | GACACACAGAUCGACC | 384 | Note that the Cas13a spacers | 49C |
| guide 65 | UGUGCGAUGAACUG | | are truncated by two | |
| | (SEQ ID No. 402) | | nucleotides at the 5′ end | |
| Gluc tiling | GUGCAGUCCACACACA | 392 | Note that the Cas13a spacers | 49C |
| guide 66 | GAUCGACCUGUGCG | | are truncated by two | |
| | (SEQ ID No. 403) | | nucleotides at the 5′ end | |
| Gluc tiling | GCCAGUUGUGCAGUCC | 399 | Note that the Cas13a spacers | 49C |
| guide 67 | ACACACAGAUCGAC | | are truncated by two | |
| | (SEQ ID No. 404) | | nucleotides at the 5′ end | |
| Gluc tiling | GGGCAGCCAGUUGUGC | 404 | Note that the Cas13a spacers | 49C |
| guide 68 | AGUCCACACACAGA | | are truncated by two | |
| | (SEQ ID No. 405) | | nucleotides at the 5′ end | |
| Gluc tiling | GUUUGAGGCAGCCAGU | 409 | Note that the Cas13a spacers | 49C |
| guide 69 | UGUGCAGUCCACAC | | are truncated by two | |
| | (SEQ ID No. 406) | | nucleotides at the 5′ end | |
| Gluc tiling | GAAGCCCUUUGAGGCA | 415 | Note that the Cas13a spacers | 49C |
| guide 70 | GCCAGUUGUGCAGU | | are truncated by two | |
| | (SEQ ID No. 407) | | nucleotides at the 5′ end | |
| Gluc tiling | GCACGUUGGCAAGCCC | 424 | Note that the Cas13a spacers | 49C |
| guide 71 | UUUGAGGCAGCCAG | | are truncated by two | |
| | (SEQ ID No. 408) | | nucleotides at the 5′ end | |
| Gluc tiling | GACUGCACGUUGGCAA | 428 | Note that the Cas13a spacers | 49C |
| guide 72 | GCCCUUUGAGGCAG | | are truncated by two | |
| | (SEQ ID No. 409) | | nucleotides at the 5′ end | |
| Gluc tiling | GGGUCAGAACACUGCA | 437 | Note that the Cas13a spacers | 49C |
| guide 73 | CGUUGGCAAGCCCU | | are truncated by two | |
| | (SEQ ID No. 410) | | nucleotides at the 5′ end | |
| Gluc tiling | GCAGGUCAGAACACUG | 439 | Note that the Cas13a spacers | 49C |
| guide 74 | CACGUUGGCAAGCC | | are truncated by two | |
| | (SEQ ID No. 411) | | nucleotides at the 5′ end | |
| Gluc tiling | GAGCAGGUCAGAACAC | 441 | Note that the Cas13a spacers | 49C |
| guide 75 | UGCACGUUGGCAAG | | are truncated by two | |
| | (SEQ ID No. 412) | | nucleotides at the 5′ end | |
| Gluc tiling | GGCCACUUCUUGAGCA | 452 | Note that the Cas13a spacers | 49C |
| guide 76 | GGUCAGAACACUGC | | are truncated by two | |
| | (SEQ ID No. 413) | | nucleotides at the 5′ end | |
| Gluc tiling | GCGGCAGCCACUUCUU | 457 | Note that the Cas13a spacers | 49C |
| guide 77 | GAGCAGGUCAGAAC | | are truncated by two | |
| | (SEQ ID No. 414) | | nucleotides at the 5′ end | |
| Gluc tiling | GUGCGGCAGCCACUUC | 459 | Note that the Cas13a spacers | 49C |
| guide 78 | UUGAGCAGGUCAGA | | are truncated by two | |
| | (SEQ ID No. 415) | | nucleotides at the 5′ end | |
| Gluc tiling | GAGCGUUGCGGCAGCC | 464 | Note that the Cas13a spacers | 49C |
| guide 79 | ACUUCUUGAGCAGG | | are truncated by two | |
| | (SEQ ID No. 416) | | nucleotides at the 5′ end | |
| Gluc tiling | GAAAGGUCGCACAGCG | 475 | Note that the Cas13a spacers | 49C |
| guide 80 | UUGCGGCAGCCACU | | are truncated by two | |
| | (SEQ ID No. 417) | | nucleotides at the 5′ end | |
| Gluc tiling | GCUGGCAAAGGUCGCA | 480 | Note that the Cas13a spacers | 49C |
| guide 81 | CAGCGUUGCGGCAG | | are truncated by two | |
| | (SEQ ID No. 418) | | nucleotides at the 5′ end | |
| Gluc tiling | GGGCAAAGGUCGCACA | 478 | Note that the Cas13a spacers | 49C |
| guide 82 | GCGUUGCGGCAGCC | | are truncated by two | |
| | (SEQ ID No. 419) | | nucleotides at the 5′ end | |
| Gluc tiling | GUGGAUCUUGCUGGCA | 489 | Note that the Cas13a spacers | 49C |
| guide 83 | AAGGUCGCACAGCG | | are truncated by two | |
| | (SEQ ID No. 420) | | nucleotides at the 5′ end | |
| Gluc tiling | GCACCUGGCCCUGGAU | 499 | Note that the Cas13a spacers | 49C |
| guide 84 | CUUGCUGGCAAAGG | | are truncated by two | |
| | (SEQ ID No. 421) | | nucleotides at the 5′ end | |
| Gluc tiling | GUGGCCCUGGAUCUUG | 495 | Note that the Cas13a spacers | 49C |
| guide 85 | CUGGCAAAGGUCGC | | are truncated by two | |
| | (SEQ ID No. 422) | | nucleotides at the 5′ end | |
| Gluc tiling | GUGAUCUUGUCCACCU | 509 | Note that the Cas13a spacers | 49C |
| guide 86 | GGCCCUGGAUCUUG | | are truncated by two | |
| | (SEQ ID No. 423) | | nucleotides at the 5′ end | |
| Gluc tiling | GCCCCUUGAUCUUGUC | 514 | Note that the Cas13a spacers | 49C |
| guide 87 | CACCUGGCCCUGGA | | are truncated by two | |
| | (SEQ ID No. 424) | | nucleotides at the 5′ end | |
| Gluc tiling | GCCCUUGAUCUUGUCC | 513 | Note that the Cas13a spacers | 49C |
| guide 88 | ACCUGGCCCUGGAU | | are truncated by two | |
| | (SEQ ID No. 425) | | nucleotides at the 5′ end | |
| Gluc tiling | GCCUUGAUCUUGUCCA | 512 | Note that the Cas13a spacers | 49C |
| guide 89 | CCUGGCCCUGGAUC | | are truncated by two | |
| | (SEQ ID No. 426) | | nucleotides at the 5′ end | |
| Gluc tiling | GGCAAAGGUCGCACAG | 477 | Note that the Cas13a spacers | 49C |
| guide 90 | CGUUGCGGCAGCCA | | are truncated by two | |
| | (SEQ ID No. 427) | | nucleotides at the 5′ end | |
| Gluc tiling | GCAAAGGUCGCACAGC | 476 | Note that the Cas13a spacers | 49C |
| guide 91 | GUUGCGGCAGCCAC | | are truncated by two | |
| | (SEQ ID No. 428) | | nucleotides at the 5′ end | |
| Gluc tiling | GAAGGUCGCACAGCGU | 474 | Note that the Cas13a spacers | 49C |
| guide 92 | UGCGGCAGCCACUU | | are truncated by two | |
| | (SEQ ID No. 429) | | nucleotides at the 5′ end | |
| Gluc tiling | GAGGUCGCACAGCGUU | 473 | Note that the Cas13a spacers | 49C |
| guide 93 | GCGGCAGCCACUUC | | are truncated by two | |
| | (SEQ ID No. 430) | | nucleotides at the 5′ end | |
| Non- | GGUAAUGCCUGGCUUG | N/A | Note that the Cas13a spacers | 49C |
| targeting | UCGACGCAUAGUCUG | | are truncated by two | |
| guide 1 | (SEQ ID No. 431) | | nucleotides at the 5′ end | |
| Non- | GGGAACCUUGGCCGUU | N/A | Note that the Cas13a spacers | 49C |
| targeting | AUAAAGUCUGACCAG | | are truncated by two | |
| guide 2 | (SEQ ID No. 432) | | nucleotides at the 5′ end | |
| Non- | GGAGGGUGAGAAUUU | N/A | Note that the Cas13a spacers | 49C |
| targeting | AGAACCAAGAUUGUUG | | are truncated by two | |
| guide 3 | (SEQ ID No. 433) | | nucleotides at the 5′ end | |

TABLE 13
Guide sequences used for Cluc knockdown

| | | | | First |
|---|---|---|---|---|
| Name | Spacer sequence | Position | Notes | FIG. |
| Cluc tiling | GAGUCCUGGCAAUGAA | 32 | Note that the Cas13a spacers | 49D |
| guide 1 | CAGUGGCGCAGUAG | | are truncated by two | |
| | (SEQ ID No. 434) | | nucleotides at the 5′ end | |
| Cluc tiling | GGGUGCCACAGCUGCU | 118 | Note that the Cas13a spacers | 49D |
| guide 2 | AUCAAUACAUUCUC | | are truncated by two | |
| | (SEQ ID No. 435) | | nucleotides at the 5′ end | |
| Cluc tiling | GUUACAUACUGACACA | 197 | Note that the Cas13a spacers | 49D |
| guide 3 | UUCGGCAACAUGUU | | are truncated by two | |
| | (SEQ ID No. 436) | | nucleotides at the 5′ end | |
| Cluc tiling | GUAUGUACCAGGUUCC | 276 | Note that the Cas13a spacers | 49D |
| guide 4 | UGGAACUGGAAUCU | | are truncated by two | |
| | (SEQ ID No. 437) | | nucleotides at the 5′ end | |
| Cluc tiling | GCCUUGGUUCCAUCCA | 350 | Note that the Cas13a spacers | 49D |
| guide 5 | GGUUCUCCAGGGUG | | are truncated by two | |
| | (SEQ ID No. 438) | | nucleotides at the 5′ end | |
| Cluc tiling | GCAGUGAUGGGAUUCU | 431 | Note that the Cas13a spacers | 49D |
| guide 6 | CAGUAGCUUGAGCG | | are truncated by two | |
| | (SEQ ID No. 439) | | nucleotides at the 5′ end | |
| Cluc tiling | GAGCCUGGCAUCUCAA | 512 | Note that the Cas13a spacers | 49D |
| guide 7 | CAACAGCGAUGGUG | | are truncated by two | |
| | (SEQ ID No. 440) | | nucleotides at the 5′ end | |
| Cluc tiling | GUGUCUGGGGCGAUUC | 593 | Note that the Cas13a spacers | 49D |
| guide 8 | UUACAGAUCUUCCU | | are truncated by two | |
| | (SEQ ID No. 441) | | nucleotides at the 5′ end | |
| Cluc tiling | GCUGGAUCUGAAGUGA | 671 | Note that the Cas13a spacers | 49D |
| guide 9 | AGUCUGUAUCUUCC | | are truncated by two | |
| | (SEQ ID No. 442) | | nucleotides at the 5′ end | |
| Cluc tiling | GGCAACGUCAUCAGGA | 747 | Note that the Cas13a spacers | 49D |
| guide 10 | UUUCCAUAGAGUGG | | are truncated by two | |
| | (SEQ ID No. 443) | | nucleotides at the 5′ end | |
| Cluc tiling | GAGGCGCAGGAGAUGG | 830 | Note that the Cas13a spacers | 49D |
| guide 11 | UGUAGUAGUAGAAG | | are truncated by two | |
| | (SEQ ID No. 444) | | nucleotides at the 5′ end | |
| Cluc tiling | GAGGGACCCUGGAAUU | 986 | Note that the Cas13a spacers | 49D |
| guide 13 | GGUAUCUUGCUUUG | | are truncated by two | |
| | (SEQ ID No. 445) | | nucleotides at the 5′ end | |
| Cluc tiling | GGUAAGAGUCAACAUU | 1066 | Note that the Cas13a spacers | 49D |
| guide 14 | CCUGUGUGAAACCU | | are truncated by two | |
| | (SEQ ID No. 446) | | nucleotides at the 5′ end | |
| Cluc tiling | GACCAGAAUCUGUUUU | 1143 | Note that the Cas13a spacers | 49D |
| guide 15 | CCAUCAACAAUGAG | | are truncated by two | |
| | (SEQ ID No. 447) | | nucleotides at the 5′ end | |
| Cluc tiling | GAUGGCUGUAGUCAGU | 1227 | Note that the Cas13a spacers | 49D |
| guide 16 | AUGUCACCAUCUUG | | are truncated by two | |
| | (SEQ ID No. 448) | | nucleotides at the 5′ end | |
| Cluc tiling | GUACCAUCGAAUGGAU | 1304 | Note that the Cas13a spacers | 49D |
| guide 17 | CUCUAAUAUGUACG | | are truncated by two | |
| | (SEQ ID No. 449) | | nucleotides at the 5′ end | |
| Cluc tiling | GAGAUCACAGGCUCCU | 1380 | Note that the Cas13a spacers | 49D |
| guide 18 | UCAGCAUCAAAAGA | | are truncated by two | |
| | (SEQ ID No. 450) | | nucleotides at the 5′ end | |
| Cluc tiling | GCUUUGACCGGCGAAG | 1461 | Note that the Cas13a spacers | 49D |
| guide 19 | AGACUAUUGCAGAG | | are truncated by two | |
| | (SEQ ID No. 451) | | nucleotides at the 5′ end | |
| Cluc tiling | GCCCCUCAGGCAAUAC | 1539 | Note that the Cas13a spacers | 49D |
| guide 20 | UCGUACAUGCAUCG | | are truncated by two | |
| | (SEQ ID No. 452) | | nucleotides at the 5′ end | |
| Cluc tiling | GCUGGUACUUCUAGGG | 1619 | Note that the Cas13a spacers | 49D |
| guide 21 | UGUCUCCAUGCUUU | | are truncated by two | |
| | (SEQ ID No. 453) | | nucleotides at the 5′ end | |
| Non- | GGUAAUGCCUGGCUUG | N/A | Note that the Cas13a spacers | 49D |
| targeting | UCGACGCAUAGUCUG | | are truncated by two | |
| guide 1 | (SEQ ID No. 454) | | nucleotides at the 5′ end | |
| Non- | GGGAACCUUGGCCGUU | N/A | Note that the Cas13a spacers | 49D |
| targeting | AUAAAGUCUGACCAG | | are truncated by two | |
| guide 2 | (SEQ ID No. 455) | | nucleotides at the 5′ end | |
| Non- | GGAGGGUGAGAAUUUA | N/A | Note that the Cas13a spacers | 49D |
| targeting | GAACCAAGAUUGUUG | | are truncated by two | |
| guide 3 | (SEQ ID No. 456) | | nucleotides at the 5′ end | |

TABLE 14
Guide sequences used in this study for RNA editing in mammalian cells.
Mismatched base flips are capitalized

| | | | First |
|---|---|---|---|
| Name | Spacer sequence | Notes | FIG. |
| Tiling 30 nt 30 | gCauccugcggccucuacucugcauucaa | Has a 5′ G for U6 | 50C |
| mismatch distance | uu | expression | |
| | (SEQ ID No. 457) | | |
| Tiling 30 nt 28 | gacCauccugcggccucuacucugcauuc | Has a 5′ G for U6 | 50C |
| mismatch distance | aa | expression | |
| | (SEQ ID No. 458) | | |
| Tiling 30 nt 26 | gaaacCauccugcggccucuacucugcau | Has a 5′ G for U6 | 50C |
| mismatch distance | uc | expression | |
| | (SEQ ID No. 459) | | |
| Tiling 30 nt 24 | gcuaaacCauccugcggccucuacucugc | Has a 5′ G for U6 | 50C |
| mismatch distance | au | expression | |
| | (SEQ ID No. 460) | | |
| Tiling 30 nt 22 | guucuaaacCauccugcggccucuacucu | Has a 5′ G for U6 | 50C |
| mismatch distance | gc | expression | |
| | (SEQ ID No. 461) | | |
| Tiling 30 nt 20 | guguucuaaacCauccugcggccucuacu | Has a 5′ G for U6 | 50C |
| mismatch distance | cu | expression | |
| | (SEQ ID No. 462) | | |
| Tiling 30 nt 18 | gaauguucuaaacCauccugcggccucua | Has a 5′ G for U6 | 50C |
| mismatch distance | cu | expression | |
| | (SEQ ID No. 463) | | |
| Tiling 30 nt 16 | gagaauguucuaaacCauccugcggccuc | Has a 5′ G for U6 | 50C |
| mismatch distance | ua | expression | |
| | (SEQ ID No. 464) | | |
| Tiling 30 nt 14 | gauagaauguucuaaacCauccugcggcc | Has a 5′ G for U6 | 50C |
| mismatch distance | uc | expression | |
| | (SEQ ID No. 465) | | |
| Tiling 30 nt 12 | gccauagaauguucuaaacCauccugcgg | Has a 5′ G for U6 | 50C |
| mismatch distance | cc | expression | |
| | (SEQ ID No. 466) | | |
| Tiling 30 nt 10 | guuccauagaauguucuaaacCauccugc | Has a 5′ G for U6 | 50C |
| mismatch distance | gg | expression | |
| | (SEQ ID No. 467) | | |
| Tiling 30 nt 8 | gcuuuccauagaauguucuaaacCauccu | Has a 5′ G for U6 | 50C |
| mismatch distance | gc | expression | |
| | (SEQ ID No. 468) | | |
| Tiling 30 nt 6 | gcucuuuccauagaauguucuaaacCauc | Has a 5′ G for U6 | 50C |
| mismatch distance | cu | expression | |
| | (SEQ ID No. 469) | | |
| Tiling 30 nt 4 | gaucucuuuccauagaauguucuaaacCa | Has a 5′ G for U6 | 50C |
| mismatch distance | uc | expression | |
| | (SEQ ID No. 470) | | |
| Tiling 30 nt 2 | ggaaucucuuuccauagaauguucuaaac | Has a 5′ G for U6 | 50C |
| mismatch distance | Ca | expression | |
| | (SEQ ID No. 471) | | |
| Tiling 50 nt 50 | gCauccugcggccucuacucugcauucaa | Has a 5′ G for U6 | 50C |
| mismatch distance | uuacauacugacacauucggca (SEQ | expression | |
| | ID No. 472) | | |
| Tiling 50 nt 48 | gacCauccugcggccucuacucugcauuc | Has a 5′ G for U6 | 50C |
| mismatch distance | aauuacauacugacacauucgg (SEQ | expression | |
| | ID No. 473) | | |
| Tiling 50 nt 46 | gaaacCauccugcggccucuacucugcau | Has a 5′ G for U6 | 50C |
| mismatch distance | ucaauuacauacugacacauuc (SEQ | expression | |
| | ID No. 474) | | |
| Tiling 50 nt 44 | gcuaaacCauccugcggccucuacucugc | Has a 5′ G for U6 | 50C |
| mismatch distance | auucaauuacauacugacacau (SEQ | expression | |
| | ID No. 475) | | |
| Tiling 50 nt 42 | guucuaaacCauccugcggccucuacucu | Has a 5′ G for U6 | 50C |
| mismatch distance | gcauucaauuacauacugacac (SEQ | expression | |
| | ID No. 476) | | |
| Tiling 50 nt 40 | guguucuaaacCauccugcggccucuacu | Has a 5′ G for U6 | 50C |
| mismatch distance | cugcauucaauuacauacugac (SEQ | expression | |
| | ID No. 477) | | |
| Tiling 50 nt 38 | gaauguucuaaacCauccugcggccucua | Has a 5′ G for U6 | 50C |
| mismatch distance | cucugcauucaauuacauacug (SEQ | expression | |
| | ID No. 478) | | |
| Tiling 50 nt 36 | gagaauguucuaaacCauccugcggccuc | Has a 5′ G for U6 | 50C |
| mismatch distance | uacucugcauucaauuacauac (SEQ | expression | |
| | ID No. 479) | | |
| Tiling 50 nt 34 | gauagaauguucuaaacCauccugcggcc | Has a 5′ G for U6 | 50C |
| mismatch distance | ucuacucugcauucaauuacau (SEQ | expression | |
| | ID No. 480) | | |
| Tiling 50 nt 32 | gccauagaauguucuaaacCauccugcgg | Has a 5′ G for U6 | 50C |
| mismatch distance | ccucuacucugcauucaauuac (SEQ | expression | |
| | ID No. 481) | | |
| Tiling 50 nt 30 | guuccauagaauguucuaaacCauccugc | Has a 5′ G for U6 | 50C |
| mismatch distance | ggccucuacucugcauucaauu (SEQ | expression | |
| | ID No. 482) | | |
| Tiling 50 nt 28 | gcuuuccauagaauguucuaaacCauccu | Has a 5′ G for U6 | 50C |
| mismatch distance | gcggccucuacucugcauucaa (SEQ | expression | |
| | ID No. 483) | | |
| Tiling 50 nt 26 | gcucuuuccauagaauguucuaaacCauc | Has a 5′ G for U6 | 50C |
| mismatch distance | cugcggccucuacucugcauuc (SEQ | expression | |
| | ID No. 484) | | |
| Tiling 50 nt 24 | gaucucuuuccauagaauguucuaaacCa | Has a 5′ G for U6 | 50C |
| mismatch distance | uccugcggccucuacucugcau (SEQ | expression | |
| | ID No. 485) | | |
| Tiling 50 nt 22 | ggaaucucuuuccauagaauguucuaaac | Has a 5′ G for U6 | 50C |
| mismatch distance | Cauccugcggccucuacucugc (SEQ | expression | |
| | ID No. 486) | | |
| Tiling 50 nt 20 | guggaaucucuuuccauagaauguucuaa | Has a 5′ G for U6 | 50C |
| mismatch distance | acCauccugcggccucuacucu (SEQ | expression | |
| | ID No. 487) | | |
| Tiling 50 nt 18 | gacuggaaucucuuuccauagaauguucu | Has a 5′ G for U6 | 50C |
| mismatch distance | aaacCauccugcggccucuacu (SEQ | expression | |
| | ID No. 488) | | |
| Tiling 50 nt 16 | ggaacuggaaucucuuuccauagaauguu | Has a 5′ G for U6 | 50C |
| mismatch distance | cuaaacCauccugcggccucua (SEQ | expression | |
| | ID No. 489) | | |
| Tiling 50 nt 14 | guggaacuggaaucucuuuccauagaaug | Has a 5′ G for U6 | 50C |
| mismatch distance | uucuaaacCauccugcggccuc (SEQ | expression | |
| | ID No. 490) | | |
| Tiling 50 nt 12 | gccuggaacuggaaucucuuuccauagaa | Has a 5′ G for U6 | 50C |
| mismatch distance | uguucuaaacCauccugcggcc (SEQ | expression | |
| | ID No. 491) | | |
| Tiling 50 nt 10 | guuccuggaacuggaaucucuuuccauag | Has a 5′ G for U6 | 50C |
| mismatch distance | aauguucuaaacCauccugcgg (SEQ | expression | |
| | ID No. 492) | | |
| Tiling 50 nt 8 | ggguuccuggaacuggaaucucuuuccau | Has a 5′ G for U6 | 50C |
| mismatch distance | agaauguucuaaacCauccugc (SEQ | expression | |
| | ID No. 493) | | |
| Tiling 50 nt 6 | gcagguuccuggaacuggaaucucuuucc | Has a 5′ G for U6 | 50C |
| mismatch distance | auagaauguucuaaacCauccu (SEQ | expression | |
| | ID No. 494) | | |
| Tiling 50 nt 4 | gaccagguuccuggaacuggaaucucuuu | Has a 5′ G for U6 | 50C |
| mismatch distance | ccauagaauguucuaaacCauc (SEQ | expression | |
| | ID No. 495) | | |
| Tiling 50 nt 2 | gguaccagguuccuggaacuggaaucucu | Has a 5′ G for U6 | 50C |
| mismatch distance | uuccauagaauguucuaaacCa (SEQ | expression | |
| | ID No. 496) | | |
| Tiling 70 nt 70 | gCauccugcggccucuacucugcauucaa | Has a 5′ G for U6 | 50C |
| mismatch distance | uuacauacugacacauucggcaacauguu | expression | |
| | uuuccugguuuau (SEQ ID No. 497) | | |
| Tiling 70 nt 68 | gacCauccugcggccucuacucugcauuc | Has a 5′ G for U6 | 50C |
| mismatch distance | aauuacauacugacacauucggcaacaug | expression | |
| | uuuuuccugguuu (SEQ ID No. | | |
| | 498) | | |
| Tiling 70 nt 66 | gaaacCauccugcggccucuacucugcau | Has a 5′ G for U6 | 50C |
| mismatch distance | ucaauuacauacugacacauucggcaaca | expression | |
| | uguuuuuccuggu (SEQ ID No. | | |
| | 499) | | |
| Tiling 70 nt 64 | gcuaaacCauccugcggccucuacucugc | Has a 5′ G for U6 | 50C |
| mismatch distance | auucaauuacauacugacacauucggcaa | expression | |
| | cauguuuuuccug (SEQ ID No. 500) | | |
| Tiling 70 nt 62 | guucuaaacCauccugcggccucuacucu | Has a 5′ G for U6 | 50C |
| mismatch distance | gcauucaauuacauacugacacauucggc | expression | |
| | aacauguuuuucc (SEQ ID No. 501) | | |
| Tiling 70 nt 60 | guguucuaaacCauccugcggccucuacu | Has a 5′ G for U6 | 50C |
| mismatch distance | cugcauucaauuacauacugacacauucg | expression | |
| | gcaacauguuuuu (SEQ ID No. 502) | | |
| Tiling 70 nt 58 | gaauguucuaaacCauccugcggccucua | Has a 5′ G for U6 | 50C |
| mismatch distance | cucugcauucaauuacauacugacacauu | expression | |
| | cggcaacauguuu (SEQ ID No. 503) | | |
| Tiling 70 nt 56 | gagaauguucuaaacCauccugcggccuc | Has a 5′ G for U6 | 50C |
| mismatch distance | uacucugcauucaauuacauacugacaca | expression | |
| | uucggcaacaugu (SEQ ID No. 504) | | |
| Tiling 70 nt 54 | gauagaauguucuaaacCauccugcggcc | Has a 5′ G for U6 | 50C |
| mismatch distance | ucuacucugcauucaauuacauacugaca | expression | |
| | cauucggcaacau (SEQ ID No. 505) | | |
| Tiling 70 nt 52 | gccauagaauguucuaaacCauccugcgg | Has a 5′ G for U6 | 50C |
| mismatch distance | ccucuacucugcauucaauuacauacuga | expression | |
| | cacauucggcaac (SEQ ID No. 506) | | |
| Tiling 70 nt 50 | guuccauagaauguucuaaacCauccugc | Has a 5′ G for U6 | 50C |
| mismatch distance | ggccucuacucugcauucaauuacauacu | expression | |
| | gacacauucggca (SEQ ID No. 507) | | |
| Tiling 70 nt 48 | gcuuuccauagaauguucuaaacCauccu | Has a 5′ G for U6 | 50C |
| mismatch distance | gcggccucuacucugcauucaauuacaua | expression | |
| | cugacacauucgg (SEQ ID No. 508) | | |
| Tiling 70 nt 46 | gcucuuuccauagaauguucuaaacCauc | Has a 5′ G for U6 | 50C |
| mismatch distance | cugcggccucuacucugcauucaauuaca | expression | |
| | uacugacacauuc (SEQ ID No. 509) | | |
| Tiling 70 nt 44 | gaucucuuuccauagaauguucuaaacCa | Has a 5′ G for U6 | 50C |
| mismatch distance | uccugcggccucuacucugcauucaauua | expression | |
| | cauacugacacau (SEQ ID No. 510) | | |
| Tiling 70 nt 42 | ggaaucucuuuccauagaauguucuaaac | Has a 5′ G for U6 | 50C |
| mismatch distance | Cauccugcggccucuacucugcauucaau | expression | |
| | uacauacugacac (SEQ ID No. 511) | | |
| Tiling 70 nt 40 | guggaaucucuuuccauagaauguucuaa | Has a 5′ G for U6 | 50C |
| mismatch distance | acCauccugcggccucuacucugcauuca | expression | |
| | auuacauacugac (SEQ ID No. 512) | | |
| Tiling 70 nt 38 | gacuggaaucucuuuccauagaauguucu | Has a 5′ G for U6 | 50C |
| mismatch distance | aaacCauccugcggccucuacucugcauu | expression | |
| | caauuacauacug (SEQ ID No. 513) | | |
| Tiling 70 nt 36 | ggaacuggaaucucuuuccauagaauguu | Has a 5′ G for U6 | 50C |
| mismatch distance | cuaaacCauccugcggccucuacucugca | expression | |
| | uucaauuacauac (SEQ ID No. 514) | | |
| Tiling 70 nt 34 | guggaacuggaaucucuuuccauagaaug | Has a 5′ G for U6 | 50C |
| mismatch distance | uucuaaacCauccugcggccucuacucug | expression | |
| | cauucaauuacau (SEQ ID No. 515) | | |
| Tiling 70 nt 32 | gccuggaacuggaaucucuuuccauagaa | Has a 5′ G for U6 | 50C |
| mismatch distance | uguucuaaacCauccugcggccucuacuc | expression | |
| | ugcauucaauuac (SEQ ID No. 516) | | |
| Tiling 70 nt 30 | guuccuggaacuggaaucucuuuccauag | Has a 5′ G for U6 | 50C |
| mismatch distance | aauguucuaaacCauccugcggccucuac | expression | |
| | ucugcauucaauu (SEQ ID No. 517) | | |
| Tiling 70 nt 28 | ggguuccuggaacuggaaucucuuuccau | Has a 5′ G for U6 | 50C |
| mismatch distance | agaauguucuaaacCauccugcggccucu | expression | |
| | acucugcauucaa (SEQ ID No. 518) | | |
| Tiling 70 nt 26 | gcagguuccuggaacuggaaucucuuucc | Has a 5′ G for U6 | 50C |
| mismatch distance | auagaauguucuaaacCauccugcggccu | expression | |
| | cuacucugcauuc (SEQ ID No. 519) | | |
| Tiling 70 nt 24 | gaccagguuccuggaacuggaaucucuuu | Has a 5′ G for U6 | 50C |
| mismatch distance | ccauagaauguucuaaacCauccugcggc | expression | |
| | cucuacucugcau (SEQ ID No. 520) | | |
| Tiling 70 nt 22 | gguaccagguuccuggaacuggaaucucu | Has a 5′ G for U6 | 50C |
| mismatch distance | uuccauagaauguucuaaacCauccugcg | expression | |
| | gccucuacucugc (SEQ ID No. 521) | | |
| Tiling 70 nt 20 | gauguaccagguuccuggaacuggaaucu | Has a 5′ G for U6 | 50C |
| mismatch distance | cuuuccauagaauguucuaaacCauccug | expression | |
| | cggccucuacucu (SEQ ID No. 522) | | |
| Tiling 70 nt 18 | gguauguaccagguuccuggaacuggaau | Has a 5′ G for U6 | 50C |
| mismatch distance | cucuuuccauagaauguucuaaacCaucc | expression | |
| | ugcggccucuacu (SEQ ID No. 523) | | |
| Tiling 70 nt 16 | gacguauguaccagguuccuggaacugga | Has a 5′ G for U6 | 50C |
| mismatch distance | aucucuuuccauagaauguucuaaacCau | expression | |
| | ccugcggccucua (SEQ ID No. 524) | | |
| Tiling 70 nt 14 | gacacguauguaccagguuccuggaacug | Has a 5′ G for U6 | 50C |
| mismatch distance | gaaucucuuuccauagaauguucuaaacC | expression | |
| | auccugcggccuc (SEQ ID No. 525) | | |
| Tiling 70 nt 12 | gcaacacguauguaccagguuccuggaac | Has a 5′ G for U6 | 50C |
| mismatch distance | uggaaucucuuuccauagaauguucuaaa | expression | |
| | cCauccugcggcc (SEQ ID No. 526) | | |
| Tiling 70 nt 10 | gcccaacacguauguaccagguuccugga | Has a 5′ G for U6 | 50C |
| mismatch distance | acuggaaucucuuuccauagaauguucua | expression | |
| | aacCauccugcgg (SEQ ID No. 527) | | |
| Tiling 70 nt 8 | ggacccaacacguauguaccagguuccug | Has a 5′ G for U6 | 50C |
| mismatch distance | gaacuggaaucucuuuccauagaauguuc | expression | |
| | uaaacCauccugc (SEQ ID No. 528) | | |
| Tiling 70 nt 6 | guugacccaacacguauguaccagguucc | Has a 5′ G for U6 | 50C |
| mismatch distance | uggaacuggaaucucuuuccauagaaugu | expression | |
| | ucuaaacCauccu (SEQ ID No. 529) | | |
| Tiling 70 nt 4 | gccuugacccaacacguauguaccagguu | Has a 5′ G for U6 | 50C |
| mismatch distance | ccuggaacuggaaucucuuuccauagaau | expression | |
| | guucuaaacCauc (SEQ ID No. 530) | | |
| Tiling 70 nt 2 | guuccuugacccaacacguauguaccagg | Has a 5′ G for U6 | 50C |
| mismatch distance | uuccuggaacuggaaucucuuuccauaga | expression | |
| | auguucuaaacCa (SEQ ID No. 531) | | |
| Tiling 84 nt 84 | gCauccugcggccucuacucugcauucaa | Has a 5′ G for U6 | 50C |
| mismatch distance | uuacauacugacacauucggcaacauguu | expression | |
| | uuuccugguuuauuuucacacagucca | | |
| | (SEQ ID No. 532) | | |
| Tiling 84 nt 82 | gacCauccugcggccucuacucugcauuc | Has a 5′ G for U6 | 50C |
| mismatch distance | aauuacauacugacacauucggcaacaug | expression | |
| | uuuuuccugguuuauuuucacacaguc | | |
| | (SEQ ID No. 533) | | |
| Tiling 84 nt 80 | gaaacCauccugcggccucuacucugcau | Has a 5′ G for U6 | 50C |
| mismatch distance | ucaauuacauacugacacauucggcaaca | expression | |
| | uguuuuuccugguuuauuuucacacag | | |
| | (SEQ ID No. 534) | | |
| Tiling 84 nt 78 | gcuaaacCauccugcggccucuacucugc | Has a 5′ G for U6 | 50C |
| mismatch distance | auucaauuacauacugacacauucggcaa | expression | |
| | cauguuuuuccugguuuauuuucacac | | |
| | (SEQ ID No. 535) | | |
| Tiling 84 nt 76 | guucuaaacCauccugcggccucuacucu | Has a 5′ G for U6 | 50C |
| mismatch distance | gcauucaauuacauacugacacauucggc | expression | |
| | aacauguuuuuccugguuuauuuucac | | |
| | (SEQ ID No. 536) | | |
| Tiling 84 nt 74 | guguucuaaacCauccugcggccucuacu | Has a 5′ G for U6 | 50C |
| mismatch distance | cugcauucaauuacauacugacacauucg | expression | |
| | gcaacauguuuuuccugguuuauuuuc | | |
| | (SEQ ID No. 537) | | |
| Tiling 84 nt 72 | gaauguucuaaacCauccugcggccucua | Has a 5′ G for U6 | 50C |
| mismatch distance | cucugcauucaauuacauacugacacauu | expression | |
| | cggcaacauguuuuuccugguuuauuu | | |
| | (SEQ ID No. 538) | | |
| Tiling 84 nt 70 | gagaauguucuaaacCauccugcggccuc | Has a 5′ G for U6 | 50C |
| mismatch distance | uacucugcauucaauuacauacugacaca | expression | |
| | uucggcaacauguuuuuccugguuuau | | |
| | (SEQ ID No. 539) | | |
| Tiling 84 nt 68 | gauagaauguucuaaacCauccugcggcc | Has a 5′ G for U6 | 50C |
| mismatch distance | ucuacucugcauucaauuacauacugaca | expression | |
| | cauucggcaacauguuuuuccugguuu | | |
| | (SEQ ID No. 540) | | |
| Tiling 84 nt 66 | gccauagaauguucuaaacCauccugcgg | Has a 5′ G for U6 | 50C |
| mismatch distance | ccucuacucugcauucaauuacauacuga | expression | |
| | cacauucggcaacauguuuuuccuggu | | |
| | (SEQ ID No. 541) | | |
| Tiling 84 nt 64 | guuccauagaauguucuaaacCauccugc | Has a 5′ G for U6 | 50C |
| mismatch distance | ggccucuacucugcauucaauuacauacu | expression | |
| | gacacauucggcaacauguuuuuccug | | |
| | (SEQ ID No. 542) | | |
| Tiling 84 nt 62 | gcuuuccauagaauguucuaaacCauccu | Has a 5′ G for U6 | 50C |
| mismatch distance | gcggccucuacucugcauucaauuacaua | expression | |
| | cugacacauucggcaacauguuuuucc | | |
| | (SEQ ID No. 543) | | |
| Tiling 84 nt 60 | gcucuuuccauagaauguucuaaacCauc | Has a 5′ G for U6 | 50C |
| mismatch distance | cugcggccucuacucugcauucaauuaca | expression | |
| | uacugacacauucggcaacauguuuuu | | |
| | (SEQ ID No. 544) | | |
| Tiling 84 nt 58 | gaucucuuuccauagaauguucuaaacCa | Has a 5′ G for U6 | 50C |
| mismatch distance | uccugcggccucuacucugcauucaauua | expression | |
| | cauacugacacauucggcaacauguuu | | |
| | (SEQ ID No. 545) | | |
| Tiling 84 nt 56 | ggaaucucuuuccauagaauguucuaaac | Has a 5′ G for U6 | 50C |
| mismatch distance | Cauccugcggccucuacucugcauucaau | expression | |
| | uacauacugacacauucggcaacaugu | | |
| | (SEQ ID No. 546) | | |
| Tiling 84 nt 54 | guggaaucucuuuccauagaauguucuaa | Has a 5′ G for U6 | 50C |
| mismatch distance | acCauccugcggccucuacucugcauuca | expression | |
| | auuacauacugacacauucggcaacau | | |
| | (SEQ ID No. 547) | | |
| Tiling 84 nt 52 | gacuggaaucucuuuccauagaauguucu | Has a 5′ G for U6 | 50C |
| mismatch distance | aaacCauccugcggccucuacucugcauu | expression | |
| | caauuacauacugacacauucggcaac | | |
| | (SEQ ID No. 548) | | |
| Tiling 84 nt 50 | ggaacuggaaucucuuuccauagaauguu | Has a 5′ G for U6 | 50C |
| mismatch distance | cuaaacCauccugcggccucuacucugca | expression | |
| | uucaauuacauacugacacauucggca | | |
| | (SEQ ID No. 549) | | |
| Tiling 84 nt 48 | guggaacuggaaucucuuuccauagaaug | Has a 5′ G for U6 | 50C |
| mismatch distance | uucuaaacCauccugcggccucuacucug | expression | |
| | cauucaauuacauacugacacauucgg | | |
| | (SEQ ID No. 550) | | |
| Tiling 84 nt 46 | gccuggaacuggaaucucuuuccauagaa | Has a 5′ G for U6 | 50C |
| mismatch distance | uguucuaaacCauccugcggccucuacuc | expression | |
| | ugcauucaauuacauacugacacauuc | | |
| | (SEQ ID No. 551) | | |
| Tiling 84 nt 44 | guuccuggaacuggaaucucuuuccauag | Has a 5′ G for U6 | 50C |
| mismatch distance | aauguucuaaacCauccugcggccucuac | expression | |
| | ucugcauucaauuacauacugacacau | | |
| | (SEQ ID No. 552) | | |
| Tiling 84 nt 42 | ggguuccuggaacuggaaucucuuuccau | Has a 5′ G for U6 | 50C |
| mismatch distance | agaauguucuaaacCauccugcggccucu | expression | |
| | acucugcauucaauuacauacugacac | | |
| | (SEQ ID No. 553) | | |
| Tiling 84 nt 40 | gcagguuccuggaacuggaaucucuuucc | Has a 5′ G for U6 | 50C |
| mismatch distance | auagaauguucuaaacCauccugcggccu | expression | |
| | cuacucugcauucaauuacauacugac | | |
| | (SEQ ID No. 554) | | |
| Tiling 84 nt 38 | gaccagguuccuggaacuggaaucucuuu | Has a 5′ G for U6 | 50C |
| mismatch distance | ccauagaauguucuaaacCauccugcggc | expression | |
| | cucuacucugcauucaauuacauacug | | |
| | (SEQ ID No. 555) | | |
| Tiling 84 nt 36 | gguaccagguuccuggaacuggaaucucu | Has a 5′ G for U6 | 50C |
| mismatch distance | uuccauagaauguucuaaacCauccugcg | expression | |
| | gccucuacucugcauucaauuacauac | | |
| | (SEQ ID No. 556) | | |
| Tiling 84 nt 34 | gauguaccagguuccuggaacuggaaucu | Has a 5′ G for U6 | 50C |
| mismatch distance | cuuuccauagaauguucuaaacCauccug | expression | |
| | cggccucuacucugcauucaauuacau | | |
| | (SEQ ID No. 557) | | |
| Tiling 84 nt 32 | gguauguaccagguuccuggaacuggaau | Has a 5′ G for U6 | 50C |
| mismatch distance | cucuuuccauagaauguucuaaacCaucc | expression | |
| | ugcggccucuacucugcauucaauuac | | |
| | (SEQ ID No. 558) | | |
| Tiling 84 nt 30 | gacguauguaccagguuccuggaacugga | Has a 5′ G for U6 | 50C |
| mismatch distance | aucucuuuccauagaauguucuaaacCau | expression | |
| | ccugcggccucuacucugcauucaauu | | |
| | (SEQ ID No. 559) | | |
| Tiling 84 nt 28 | gacacguauguaccagguuccuggaacug | Has a 5′ G for U6 | 50C |
| mismatch distance | gaaucucuuuccauagaauguucuaaacC | expression | |
| | auccugcggccucuacucugcauucaa | | |
| | (SEQ ID No. 560) | | |
| Tiling 84 nt 26 | gcaacacguauguaccagguuccuggaac | Has a 5′ G for U6 | 50C |
| mismatch distance | uggaaucucuuuccauagaauguucuaaa | expression | |
| | cCauccugcggccucuacucugcauuc | | |
| | (SEQ ID No. 561) | | |
| Tiling 84 nt 24 | gcccaacacguauguaccagguuccugga | Has a 5′ G for U6 | 50C |
| mismatch distance | acuggaaucucuuuccauagaauguucua | expression | |
| | aacCauccugcggccucuacucugcau | | |
| | (SEQ ID No. 562) | | |
| Tiling 84 nt 22 | ggacccaacacguauguaccagguuccug | Has a 5′ G for U6 | 50C |
| mismatch distance | gaacuggaaucucuuuccauagaauguuc | expression | |
| | uaaacCauccugcggccucuacucugc | | |
| | (SEQ ID No. 563) | | |
| Tiling 84 nt 20 | guugacccaacacguauguaccagguucc | Has a 5′ G for U6 | 50C |
| mismatch distance | uggaacuggaaucucuuuccauagaaugu | expression | |
| | ucuaaacCauccugcggccucuacucu | | |
| | (SEQ ID No. 564) | | |
| Tiling 84 nt 18 | gccuugacccaacacguauguaccagguu | Has a 5′ G for U6 | 50C |
| mismatch distance | ccuggaacuggaaucucuuuccauagaau | expression | |
| | guucuaaacCauccugcggccucuacu | | |
| | (SEQ ID No. 565) | | |
| Tiling 84 nt 16 | guuccuugacccaacacguauguaccagg | Has a 5′ G for U6 | 50C |
| mismatch distance | uuccuggaacuggaaucucuuuccauaga | expression | |
| | auguucuaaacCauccugcggccucua | | |
| | (SEQ ID No. 566) | | |
| Tiling 84 nt 14 | ggguuccuugacccaacacguauguacca | Has a 5′ G for U6 | 50C |
| mismatch distance | gguuccuggaacuggaaucucuuuccaua | expression | |
| | gaauguucuaaacCauccugcggccuc | | |
| | (SEQ ID No. 567) | | |
| Tiling 84 nt 12 | guugguuccuugacccaacacguauguac | Has a 5′ G for U6 | 50C |
| mismatch distance | cagguuccuggaacuggaaucucuuucca | expression | |
| | uagaauguucuaaacCauccugcggcc | | |
| | (SEQ ID No. 568) | | |
| Tiling 84 nt 10 | gccuugguuccuugacccaacacguaugu | Has a 5′ G for U6 | 50C |
| mismatch distance | accagguuccuggaacuggaaucucuuuc | expression | |
| | cauagaauguucuaaacCauccugcgg | | |
| | (SEQ ID No. 569) | | |
| Tiling 84 nt 8 | ggcccuugguuccuugacccaacacguau | Has a 5′ G for U6 | 50C |
| mismatch distance | guaccagguuccuggaacuggaaucucuu | expression | |
| | uccauagaauguucuaaacCauccugc | | |
| | (SEQ ID No. 570) | | |
| Tiling 84 nt 6 | gccgcccuugguuccuugacccaacacgu | Has a 5′ G for U6 | 50C |
| mismatch distance | auguaccagguuccuggaacuggaaucuc | expression | |
| | uuuccauagaauguucuaaacCauccu | | |
| | (SEQ ID No. 571) | | |
| Tiling 84 nt 4 | gcgccgcccuugguuccuugacccaacac | Has a 5′ G for U6 | 50C |
| mismatch distance | guauguaccagguuccuggaacuggaauc | expression | |
| | ucuuuccauagaauguucuaaacCauc | | |
| | (SEQ ID No. 572) | | |
| Tiling 84 nt 2 | ggucgccgcccuugguuccuugacccaac | Has a 5′ G for U6 | 50C |
| mismatch distance | acguauguaccagguuccuggaacuggaa | expression | |
| | ucucuuuccauagaauguucuaaacCa | | |
| | (SEQ ID No. 573) | | |
| ADAR non-targeting | GUAAUGCCUGGCUUGUCGA | Has a 5′ G for U6 | 50C |
| guide | CGCAUAGUCUG (SEQ ID No. | expression | |
| | 574) | | |
| PFS binding screen | gaaaacgcagguuccucCaguuucggga | Has a 5′ G for U6 | 51B |
| guide for TAG motif | gcagcgcacgucucccuguaguc (SEQ | expression | |
| | ID No. 575) | | |
| PFS binding screen | gacgcagguuccucuagCuucgggagca | Has a 5′ G for U6 | 51B |
| guide for AAC motif | gcgcacgucucccuguagucaag (SEQ | expression | |
| | ID No. 576) | | |
| PFS binding screen | GUAAUGCCUGGCUUGUCGA | Has a 5′ G for U6 | 51B |
| non-targeting | CGCAUAGUCUG (SEQ ID No. | expression | |
| | 577) | | |
| Motif preference | gauagaauguucuaaacCauccugcggcc | Has a 5′ G for U6 | 51C |
| targeting guide | ucuacucugcauucaauuacau (SEQ | expression | |
| | ID No. 578) | | |
| Motif preference | GUAAUGCCUGGCUUGUCGA | Has a 5′ G for U6 | 51C |
| non-targeting guide | CGCAUAGUCUG (SEQ ID No. | expression | |
| | 579) | | |
| PPIB tiling guide 50 | gCaaggccacaaaauuauccacuguuuuu | Has a 5′ G for U6 | 57D |
| mismatch distance | ggaacagucuuuccgaagagac (SEQ | expression | |
| | ID No. 580) | | |
| PPIB tiling guide 42 | gccuguagcCaaggccacaaaauuaucca | Has a 5′ G for U6 | 57D |
| mismatch distance | cuguuuuuggaacagucuuucc (SEQ | expression | |
| | ID No. 581) | | |
| PPIB tiling guide 34 | gcuuucucuccuguagcCaaggccacaaa | Has a 5′ G for U6 | 57D |
| mismatch distance | auuauccacuguuuuuggaaca (SEQ | expression | |
| | ID No. 582) | | |
| PPIB tiling guide 26 | ggccaaauccuuucucuccuguagcCaag | Has a 5′ G for U6 | 57D |
| mismatch distance | gccacaaaauuauccacuguuu (SEQ | expression | |
| | ID No. 583) | | |
| PPIB tiling guide 18 | guuuuuguagccaaauccuuucucuccug | Has a 5′ G for U6 | 57D |
| mismatch distance | uagcCaaggccacaaaauuauc (SEQ | expression | |
| | ID No. 584) | | |
| PPIB tiling guide 10 | gauuugcuguuuuuguagccaaauccuu | Has a 5′ G for U6 | 57D |
| mismatch distance | ucucuccuguagcCaaggccaca (SEQ | expression | |
| | ID No. 585) | | |
| PPIB tiling guide 2 | gacgauggaauuugcuguuuuuguagcc | Has a 5′ G for U6 | 57D |
| mismatch distance | aaauccuuucucuccuguagcCa (SEQ | expression | |
| | ID No. 586) | | |
| Targeting guide, | gauagaauguucuaaacGauccugcggcc | Has a 5′ G for U6 | 57D |
| opposite base G | ucuacucugcauucaauuacau (SEQ | expression | |
| | ID No. 587) | | |
| Targeting guide, | gauagaauguucuaaacAauccugcggcc | Has a 5′ G for U6 | 57D |
| opposite base A | ucuacucugcauucaauuacau (SEQ | expression | |
| | ID No. 588) | | |
| Targeting guide, | gauagaauguucuaaacUauccugcggcc | Has a 5′ G for U6 | 57D |
| opposite base C | ucuacucugcauucaauuacau (SEQ | expression | |
| | ID No. 589) | | |
| AVPR2 guide 37 | ggucccacgcggccCacagcugcaccagg | Has a 5′ G for U6 | 52A |
| mismatch distance | aagaagggugcccagcacagca (SEQ | expression | |
| | ID No. 590) | | |
| AVPR2 guide 35 | ggggucccacgcggccCacagcugcacca | Has a 5′ G for U6 | 52A |
| mismatch distance | ggaagaagggugcccagcacag (SEQ | expression | |
| | ID No. 591) | | |
| AVPR2 guide 33 | gccgggucccacgcggccCacagcugcac | Has a 5′ G for U6 | 52A |
| mismatch distance | caggaagaagggugcccagcac (SEQ | expression | |
| | ID No. 592) | | |
| FANCC guide 37 | gggugaugacauccCaggcgaucgugug | Has a 5′ G for U6 | 52B |
| mismatch distance | gccuccaggagcccagagcagga (SEQ | expression | |
| | ID No. 593) | | |
| FANCC guide 35 | gagggugaugacauccCaggcgaucgug | Has a 5′ G for U6 | 52B |
| mismatch distance | uggccuccaggagcccagagcag (SEQ | expression | |
| | ID No. 594) | | |
| FANCC guide 32 | gaucagggugaugacauccCaggcgauc | Has a 5′ G for U6 | 52B |
| mismatch distance | guguggccuccaggagcccagag (SEQ | expression | |
| | ID No. 595) | | |
| Synthetic disease | gguggcuccauucacucCaaugcugagca | Has a 5′ G for U6 | 52E |
| gene target IL2RG | cuuccacagaguggguuaaagc (SEQ | expression | |
| | ID No. 596) | | |
| Synthetic disease | guuucuaauauauuuugCcagacugaug | Has a 5′ G for U6 | 52E |
| gene target F8 | gacuauucucaauuaauaaugau (SEQ | expression | |
| | ID No. 597) | | |
| Synthetic disease | gagauguugcuguggauCcaguccacag | Has a 5′ G for U6 | 52E |
| gene target LDLR | ccagcccgucgggggccuggaug (SEQ | expression | |
| | ID No. 598) | | |
| Synthetic disease | gcaggccggcccagcugCcaggugcaccu | Has a 5′ G for U6 | 52E |
| gene target CBS | gcucggagcaucgggccggauc (SEQ | expression | |
| | ID No. 599) | | |
| Synthetic disease | gcaaagaaccucuggguCcaaggguagac | Has a 5′ G for U6 | 52E |
| gene target HBB | caccagcagccugcccagggcc (SEQ | expression | |
| | ID No. 600) | | |
| Synthetic disease | gaagagaaacuuaguuuCcagggcuuug | Has a 5′ G for U6 | 52E |
| gene target ALDOB | guagagggcaaagguugauagca (SEQ | expression | |
| | ID No. 601) | | |
| Synthetic disease | gucagccuagugcagagCcacugguagu | Has a 5′ G for U6 | 52E |
| gene target DMD | uggugguuagaguuucaaguucc (SEQ | expression | |
| | ID No. 602) | | |
| Synthetic disease | ggcucauugugaacaggCcaguaauguc | Has a 5′ G for U6 | 52E |
| gene target SMAD4 | cgggauggggcggcauaggcggg (SEQ | expression | |
| | ID No. 603) | | |
| Synthetic disease | guagcuaaagaacuugaCcaagacauauc | Has a 5′ G for U6 | 52E |
| gene target BRCA2 | aggauccaccucagcuccuaga (SEQ | expression | |
| | ID No. 604) | | |
| Synthetic disease | ggggcauuguucugugcCcaguccugcu | Has a 5′ G for U6 | 52E |
| gene target GRIN2A | gguagaccugcuccccgguggcu (SEQ | expression | |
| | ID No. 605) | | |
| Synthetic disease | gagaagucguucaugugCcaccguggga | Has a 5′ G for U6 | 52E |
| gene target SCN9A | gcguacagucaucauugaucuug (SEQ | expression | |
| | ID No. 606) | | |
| Synthetic disease | gggauuaaugcugaacgCaccaaaguuca | Has a 5′ G for U6 | 52E |
| gene target | ucccaccacccauauuacuacc (SEQ ID | expression | |
| TARDBP | No. 607) | | |
| Synthetic disease | gcuccaaaggcuuuccuCcacuguugcaa | Has a 5′ G for U6 | 52E |
| gene target CFTR | aguuauugaaucccaagacaca (SEQ | expression | |
| | ID No. 608) | | |
| Synthetic disease | gaugaaugaacgauuucCcagaacucccu | Has a 5′ G for U6 | 52E |
| gene target UBE3A | aaucagaacagagucccuggua (SEQ | expression | |
| | ID No. 609) | | |
| Synthetic disease | ggagccucugccggagcCcagagaacccg | Has a 5′ G for U6 | 52E |
| gene target SMPD1 | agagucagacagagccagcgcc (SEQ | expression | |
| | ID No. 610) | | |
| Synthetic disease | ggcuuccguggagacacCcaaucaauuug | Has a 5′ G for U6 | 52E |
| gene target USH2A | aagagaucuugaagugaugcca (SEQ | expression | |
| | ID No. 611) | | |
| Synthetic disease | gugggacugcccuccucCcauuugcaga | Has a 5′ G for U6 | 52E |
| gene target MEN1 | ugccgucguagaaucgcagcagg (SEQ | expression | |
| | ID No. 612) | | |
| Synthetic disease | gcuucuucaauaguucuCcagcuacacug | Has a 5′ G for U6 | 52E |
| gene target C8orf37 | gcaggcauaugcccguguuccu (SEQ | expression | |
| | ID No. 613) | | |
| Synthetic disease | gauuccuuuucuucgucCcaauucaccuc | Has a 5′ G for U6 | 52E |
| gene target MLH1 | aguggcuagucgaagaaugaag (SEQ | expression | |
| | ID No. 614) | | |
| Synthetic disease | gcagcuucagcaccuucCagucagacucc | Has a 5′ G for U6 | 52E |
| gene target TSC2 | ugcuucaagcacugcagcagga (SEQ | expression | |
| | ID No. 615) | | |
| Synthetic disease | gccauuugcuugcagugCcacuccagag | Has a 5′ G for U6 | 52E |
| gene target NF1 | gauuccggauugccauaaauacu (SEQ | expression | |
| | ID No. 616) | | |
| Synthetic disease | guucaauaguuuuggucCaguaucguuu | Has a 5′ G for U6 | 52E |
| gene target MSH6 | acagcccuucuugguagauuuca (SEQ | expression | |
| | ID No. 617) | | |
| Synthetic disease | ggcaaccgucuucugacCaaauggcagaa | Has a 5′ G for U6 | 52E |
| gene target SMN1 | cauuuguccccaacuuuccacu (SEQ | expression | |
| | ID No. 618) | | |
| Synthetic disease | gcgacuuuccaaugaacCacugaagccca | Has a 5′ G for U6 | 52E |
| gene target SH3TC2 | gguaugacaaagccgaugaucu (SEQ | expression | |
| | ID No. 619) | | |
| Synthetic disease | guuuacacucaugcuucCacagcuuuaac | Has a 5′ G for U6 | 52E |
| gene target DNAH5 | agaucauuugguuccuugauga (SEQ | expression | |
| | ID No. 620) | | |
| Synthetic disease | gcuuaagcuuccgugucCagccuucagg | Has a 5′ G for U6 | 52E |
| gene target MECP2 | caggguggggucaucauacaugg (SEQ | expression | |
| | ID No. 621) | | |
| Synthetic disease | ggacagcugggcugaucCaugaugucau | Has a 5′ G for U6 | 52E |
| gene target | ccagaaacacuggggacccucag (SEQ | expression | |
| ADGRV1 | ID No. 622) | | |
| Synthetic disease | gucucaucucaacuuucCauauccguauc | Has a 5′ G for U6 | 52E |
| gene target AHI1 | auggaaucauagcauccuguaa (SEQ | expression | |
| | ID No. 623) | | |
| Synthetic disease | gcaugcagacgcgguucCacucgcagcca | Has a 5′ G for U6 | 52E |
| gene target PRKN | caguuccagcaccacucgagcc (SEQ | expression | |
| | ID No. 624) | | |
| Synthetic disease | guugguuagggucaaccCaguauucucc | Has a 5′ G for U6 | 52E |
| gene target COL3A1 | acucuugaguucaggauggcaga (SEQ | expression | |
| | ID No. 625) | | |
| Synthetic disease | gcuacacuguccaacacCcacucucgggu | Has a 5′ G for U6 | 52E |
| gene target BRCA1 | caccacaggugccucacacauc (SEQ ID | expression | |
| | No. 626) | | |
| Synthetic disease | gcugcacuguguaccccCagagcuccgug | Has a 5′ G for U6 | 52E |
| gene target | uugccgacauccugggguggcu (SEQ | expression | |
| MYBPC3 | ID No. 627) | | |
| Synthetic disease | gagcuuccugccacuccCaacagguuuca | Has a 5′ G for U6 | 52E |
| gene target APC | caguaagcgcguaucuguucca (SEQ | expression | |
| | ID No. 628) | | |
| Synthetic disease | gacggcaagagcuuaccCagucacuugug | Has a 5′ G for U6 | 52E |
| gene target BMPR2 | uggagacuuaaauacuugcaua (SEQ | expression | |
| | ID No. 629) | | |
| KRAS tiling guide | gCaaggccacaaaauuauccacuguuuuu | Has a 5′ G for U6 | 53A |
| 50 mismatch | ggaacagucuuuccgaagagac (SEQ | expression | |
| distance | ID No. 630) | | |
| KRAS tiling guide | gccuguagcCaaggccacaaaauuaucca | Has a 5′ G for U6 | 53A |
| 42 mismatch | cuguuuuuggaacagucuuucc (SEQ | expression | |
| distance | ID No. 631) | | |
| KRAS tiling guide | gcuuucucuccuguagcCaaggccacaaa | Has a 5′ G for U6 | 53A |
| 34 mismatch | auuauccacuguuuuuggaaca (SEQ | expression | |
| distance | ID No. 632) | | |
| KRAS tiling guide | ggccaaauccuuucucuccuguagcCaag | Has a 5′ G for U6 | 53A |
| 26 mismatch | gccacaaaauuauccacuguuu (SEQ | expression | |
| distance | ID No. 633) | | |
| KRAS tiling guide | guuuuuguagccaaauccuuucucuccug | Has a 5′ G for U6 | 53A |
| 18 mismatch | uagcCaaggccacaaaauuauc (SEQ | expression | |
| distance | ID No. 634) | | |
| KRAS tiling guide | gauuugcuguuuuuguagccaaauccuu | Has a 5′ G for U6 | 53A |
| 10 mismatch | ucucuccuguagcCaaggccaca (SEQ | expression | |
| distance | ID No. 635) | | |
| KRAS tiling guide 2 | gacgauggaauuugcuguuuuuguagcc | Has a 5′ G for U6 | 53A |
| mismatch distance | aaauccuuucucuccuguagcCa (SEQ | expression | |
| | ID No. 636) | | |
| KRAS tiling non- | GUAAUGCCUGGCUUGUCGA | Has a 5′ G for U6 | 53A |
| targeting guide | CGCAUAGUCUG (SEQ ID No. | expression | |
| | 637) | | |
| Luciferase W85X | gauagaauguucuaaacCauccugcggcc | Has a 5′ G for U6 | 53B |
| targeting guide for | ucuacucugcauucaauuacau (SEQ | expression | |
| transcriptome | ID No. 638) | | |
| specificity | | | |
| Non-targeting guide | GCAGGGUUUUCCCAGUCAC | Has a 5′ G for U6 | 53C |
| for transcriptome | GACGUUGUAAAGUUG (SEQ | expression | |
| specificity | ID No. 639) | | |
| endogenous KRAS | gucaaggcacucuugccCacgccaccagc | Has a 5′ G for U6 | 54F |
| guide 2 | uccaacuaccacaaguuuauau (SEQ | expression | |
| | ID No. 640) | | |
| endogenous PPIB | gcaaagaucacccggccCacaucuucauc | Has a 5′ G for U6 | 54G |
| guide 1 | uccaauucguaggucaaaauac (SEQ | expression | |
| | ID No. 641) | | |
| endogenous KRAS | GcgccaccagcuccaacCaccacaaguuu | Has a 5′ G for U6 | 54F |
| guide 1 | auauucagucauuuucagcagg (SEQ | expression | |
| | ID No. 642) | | |
| endogenous KRAS | GuuucuccaucaauuacCacuugcuucc | Has a 5′ G for U6 | 54F |
| guide 3 | uguaggaauccucuauuGUugga | expression | |
| | (SEQ ID No. 643) | | |
| endogenous PPIB | GcuuucucuccuguagcCaaggccacaa | Has a 5′ G for U6 | 54G |
| guide 2 | aauuauccacuguuuuuggaaca (SEQ | expression | |
| | ID No. 644) | | |
| endogenous non- | GUAAUGCCUGGCUUGUCGA | Has a 5′ G for U6 | 54F |
| targeting guide | CGCAUAGUCUG (SEQ ID No. | expression | |
| | 645) | | |
| BoxB Cluc guide | ucuuuccauaGGCCCUGAAAAA | Has a 5′ G for U6 | 62B |
| | GGGCCuguucuaaacCauccugcggc | expression | |
| | cucuacucGGCCCUGAAAAAGG | | |
| | GCCauucaauuac (SEQ ID No. | | |
| | 646) | | |
| BoxB non-targeting | cagcuggcgaGGCCCUGAAAAA | Has a 5′ G for U6 | 62B |
| guide | GGGCCggggaugugcCgcaaggcgau | expression | |
| | uaaguuggGGCCCUGAAAAAGG | | |
| | GCCacgccagggu (SEQ ID No. | | |
| | 647) | | |
| Stafforst full length | GUGGAAUAGUAUAACAAUA | Has a 5′ G for U6 | 62C |
| ADAR2 guide 1 | UGCUAAAUGUUGUUAUAGU | expression | |
| | AUCCCACucuaaaCCAuccugcgG | | |
| | GGCCCUCUUCAGGGCCC | | |
| | (SEQ ID No. 648) | | |
| Stafforst full length | GUGGAAUAGUAUAACAAUA | Has a 5′ G for U6 | 62C |
| ADAR2 non- | UGCUAAAUGUUGUUAUAGU | expression | |
| targeting guide | AUCCCACacccuggcguuacccaGG | | |
| | GCCCUCUUCAGGGCCC (SEQ | | |
| | ID No. 649) | | |

### Example 4

[1183] FIG. 77 Exemplary fusion points via which a nucleotide deaminase is linked to a Cas13b. The fusion points may be one or more amino acids on Cas13b. For example, the fusion points may be one or more of amino acids 411-429, 114-124, 197-241, 607-624. In one example, the amino acids are in Prevotella buccae Cas13b.

### Example 5

[1184] Mutations in ADAR affecting ADAR activity were screened using yeast screening. The screen was performed in multiple rounds. Each round of screening yielded a set of candidate mutations. The candidate mutations were then validated in mammalian cells. The top-performing mutations were added to the last version of mutations and re-screened. The mutations screened in 10 rounds are shown in the table below and FIG. 78. The mutant identified in round n was designated as “RESCUE vn-1.” As discussed herein RESCUE refer to mutations that convert adenosine deaminase activity to cytidine deaminase activity.

| RESCUE | | Plasmid |
|---|---|---|
| Round | ADAR mutations | number |
| RESCUEv0 | E488Q | pAB0048 |
| RESCUEv1 | E488Q, V351G | pAB0359 |
| RESCUEv2 | E488Q, V351G, S486A | pAB1188 |
| RESCUEv3 | E488Q, V351G, S486A, T375S | pAB0642 |
| RESCUEv4 | E488Q, V351G, S486A, T375S, | pAB1072 |
| | S370C, | |
| RESCUEv5 | E488Q, V351G, S486A, T375S, | pAB1135 |
| | S370C, P462A | |
| RESCUEv6 | E488Q, V351G, S486A, T375S, | pAB1146 |
| | S370C, P462A, N597I | |
| RESCUEv7 | E488Q, V351G, S486A, T375S, | pAB1194 |
| | S370C, P462A, N597I, L332I | |
| RESCUEv8 | E488Q, V351G, S486A, T375S, | pAB1220 |
| | S370C, P462A, N597I, L332I, | |
| | I398V | |
| RESCUEv9 | E488Q, V351G, S486A, T375S, | pAB1327 |
| | S370C, P462A, N597I, L332I, | |
| | I398V, K350I | |

[1185] Dose responses of the RESCUE mutants were tested on the T motif (FIG. 79) and C and G motifs (FIG. 80). Endogenous targeting with RESCUE v3, v6, v7, and v8 was tested (FIGS. 81 and 82).

[1186] Screening for mutations for RESCUE v9 was performed (FIG. 83). Potential mutations for RESCUEv9 were identified (FIG. 84). Base flip and motif testing were performed (FIG. 85). Effects of RESCUEv9 was tested on different motif flip (FIG. 86). The data suggests v9 worked better with C-flip guides. Comparison between B6 and B12 with RESCUE v1 and v8 were performed with 50 bp guides (FIGS. 87 and 30 bp guides (FIG. 88).

[1187] The invention further relates to the following aspects, which are described hereinbelow as numbered statements:

[1188] 1. A method of modifying an Adenine in a target RNA sequence of interest, comprising delivering to said target RNA:

(a) a catalytically inactive (dead) Cas13 protein;
(b) a guide molecule which comprises a guide sequence linked to a direct repeat sequence; and
(c) an adenosine deaminase protein or catalytic domain thereof;
wherein said adenosine deaminase protein or catalytic domain thereof is covalently or non-covalently linked to said dead Cas13 protein or said guide molecule or is adapted to link thereto after delivery;
wherein guide molecule forms a complex with said dead Cas13 protein and directs said complex to bind said target RNA sequence of interest, wherein said guide sequence is capable of hybridizing with a target sequence comprising said Adenine to form an RNA duplex, wherein said guide sequence comprises a non-pairing Cytosine at a position corresponding to said Adenine resulting in an A-C mismatch in the RNA duplex formed;
wherein said adenosine deaminase protein or catalytic domain thereof deaminates said Adenine in said RNA duplex.

[1189] 2. The method of statement 1, wherein said Cas13 protein is Cas13a, Cas13b or Cas 13c.

[1190] 3. The method of statement 1, wherein said adenosine deaminase protein or catalytic domain thereof is fused to N- or C-terminus of said dead Cas13 protein.

[1191] 4. The method of statement 3, wherein said adenosine deaminase protein or catalytic domain thereof is fused to said dead Cas13 protein by a linker.

[1192] 5. The method of statement 4, wherein said linker is (GGGGS)₃₋₁₁, GSG₅ or LEPGEKPYKCPECGKSFSQSGALTRHQRTHTR, or wherein said linker is an XTEN linker.

[1193] 6. The method of statement 1, wherein said adenosine deaminase protein or catalytic domain thereof is linked to an adaptor protein and said guide molecule or said dead Cas13 protein comprises an aptamer sequence capable of binding to said adaptor protein.

[1194] 7. The method of statement 6, wherein said adaptor sequence is selected from MS2, PP7, Qβ, F2, GA, fr, JP501, M12, R17, BZ13, JP34, JP500, KU1, M11, MX1, TW18, VK, SP, FI, ID2, NL95, TW19, AP205, ϕCb5, ϕCb8r, ϕCb12r, ϕCb23r, 7s and PRR1.

[1195] 8. The method of statement 1, wherein said adenosine deaminase protein or catalytic domain thereof is inserted into an internal loop of said dead Cas13 protein.

[1196] 9. The method of statement 8, wherein said Cas13 protein is a Cas13a protein and said Cas13a comprises one or more mutations the two HEPN domains, particularly at position R474 and R1046 of Cas 13a protein originating from Leptotrichia wadei or amino acid positions corresponding thereto of a Cas13a ortholog.

[1197] 10. The method of statement 9, wherein said Cas13 protein is a Cas13b protein and said Cas13b comprises a mutation in one or more of positions R116, H121, R1177, H1182 of Cas13b protein originating from Bergeyella zoohelcum ATCC 43767 or amino acid positions corresponding thereto of a Cas13b ortholog.

[1198] 11. The method of statement, wherein said mutation is one or more of R116A, H121A, R1177A, H1182A of Cas13b protein originating from Bergeyella zoohelcum ATCC 43767 or amino acid positions corresponding thereto of a Cas13b ortholog.

[1199] 12. The method of any of statement 1, wherein said guide sequence has a length of about 20-53 nt, preferably 25-53 nt, more preferably 29-53 nt capable of forming said RNA duplex with said target sequence.

[1200] 13. The method of any of statement 12, wherein said guide sequence has a length of about 40-50 nt capable of forming said RNA duplex with said target sequence.

[1201] 14. The method of statement 1, wherein the distance between said non-pairing C and the 5′ end of said guide sequence is 20-30 nucleotides.

[1202] 15. The method of any of the preceding statements, wherein said adenosine deaminase protein or catalytic domain thereof is a human, cephalopod, or Drosophila adenosine deaminase protein or catalytic domain thereof.

[1203] 16. The method of statement 1, wherein said adenosine deaminase protein or catalytic domain thereof has been modified to comprise a mutation at glutamic acid⁴⁸⁸ of the hADAR2-D amino acid sequence, or a corresponding position in a homologous ADAR protein.

[1204] 17. The method of statement 16, wherein said glutamic acid residue at position 488 or a corresponding position in a homologous ADAR protein is replaced by a glutamine residue (E488Q).

[1205] 18. The method of statement 16 or 17, wherein said adenosine deaminase protein or catalytic domain thereof is a mutated hADAR2d comprising mutation E488Q or a mutated hADAR1d comprising mutation El 008Q.

[1206] 19. The method of any of the preceding statements wherein the guide sequence comprises more than one mismatch corresponding to different adenosine sites in the target RNA sequence or wherein two guide molecules are used, each comprising a mismatch corresponding to a different adenosine sites in the target RNA sequence.

[1207] 20. The method of any of the preceding statements, wherein said Cas13 protein and optionally said adenosine deaminase protein or catalytic domain thereof comprise one or more heterologous nuclear localization signal(s) (NLS(s)).

[1208] 21. The method of any of the preceding statements, wherein said method comprises, determining said target sequence of interest and selecting said adenosine deaminase protein or catalytic domain thereof which most efficiently deaminates said Adenine present in said target sequence.

[1209] 22. The method of any of the preceding statements, wherein said catalytically inactive Cas13 protein is obtained from a Cas13 nuclease derived from a bacterial species selected from the group consisting of the bacterial species listed in any of Tables 1, 2, 3, or 4.

[1210] 23. The method of any of the preceding statements, wherein said target RNA sequence of interest is within a cell.

[1211] 24. The method of statement 23, wherein said cell is a eukaryotic cell.

[1212] 25. The method of statement 24, wherein said cell is a non-human animal cell.

[1213] 26. The method of statement 24, wherein said cell is a human cell.

[1214] 27. The method of statement 24, wherein said cell is a plant cell.

[1215] 28. The method of any of the preceding statements, wherein said target locus of interest is within an animal.

[1216] 29. The method of any of the preceding statements, wherein said target locus of interest is within a plant.

[1217] 30. The method of any of the preceding statements, wherein said target RNA sequence of interest is comprised in an RNA polynucleotide in vitro.

[1218] 31. The method of any of the preceding statements, wherein said components (a), (b) and (c) are delivered to said cell as a ribonucleoprotein complex.

[1219] 32. The method of any of the preceding statements, wherein said components (a), (b) and (c) are delivered to said cell as one or more polynucleotide molecules.

[1220] 33. The method of statement 32, wherein said one or more polynucleotide molecules comprise one or more mRNA molecules encoding components (a) and/or (c).

[1221] 34. The method of statement 33, wherein said one or more polynucleotide molecules are comprised within one or more vectors.

[1222] 35. The method of statement 34, wherein said one or more polynucleotide molecules comprise one or more regulatory elements operably configured to express said Cas13 protein, said guide molecule, and said adenosine deaminase protein or catalytic domain thereof, optionally wherein said one or more regulatory elements comprise inducible promoters.

[1223] 36. The method of statement 32, wherein said one or more polynucleotide molecules or said ribonucleoprotein complex are delivered via particles, vesicles, or one or more viral vectors.

[1224] 37. The method of statement 36, wherein said particles comprise a lipid, a sugar, a metal or a protein.

[1225] 38. The method of statement 37, wherein said particles comprise lipid nanoparticles.

[1226] 39. The method of statement 36, wherein said vesicles comprise exosomes or liposomes.

[1227] 40. The method of statement 34, wherein said one or more viral vectors comprise one or more of adenovirus, one or more lentivirus or one or more adeno-associated virus.

[1228] 41. The method of any of the preceding statements, where said method modifies a cell, a cell line or an organism by manipulation of one or more target RNA sequences.

[1229] 42. The method of statement 41, wherein said deamination of said Adenine in said target RNA of interest remedies a disease caused by transcripts containing a pathogenic G→A or C→T point mutation.

[1230] 43. The method of statement 42, wherein said disease is selected from Meier-Gorlin syndrome, Seckel syndrome 4, Joubert syndrome 5, Leber congenital amaurosis 10; Charcot-Marie-Tooth disease, type 2; Charcot-Marie-Tooth disease, type 2; Usher syndrome, type 2C; Spinocerebellar ataxia 28; Spinocerebellar ataxia 28; Spinocerebellar ataxia 28; Long QT syndrome 2; Sjögren-Larsson syndrome; Hereditary fructosuria; Hereditary fructosuria; Neuroblastoma; Neuroblastoma; Kallmann syndrome 1; Kallmann syndrome 1; Kallmann syndrome 1; Metachromatic leukodystrophy, Rett syndrome, Amyotrophic lateral sclerosis type 10, Li-Fraumeni syndrome, or a disease listed in Table 5.

[1231] 44. The method of statement 42, wherein said disease is a premature termination disease.

[1232] 45. The method of statement 41, wherein said modification affects the fertility of an organism.

[1233] 46. The method of statement 41, wherein said modification affects splicing of said target RNA sequence.

[1234] 47. The method of statement 41, wherein said modification introduces a mutation in a transcript introducing an amino acid change and causing expression of a new antigen in a cancer cell.

[1235] 48. The method of statement 41, wherein said target RNA is comprised within a microRNA.

[1236] 49. The method of statement 41, wherein said deamination of said Adenine in said target RNA of interest causes a gain of function or a loss of function of a gene.

[1237] 50. The method of statement 49, wherein said gene is a gene expressed by a cancer cell.

[1238] 51. A modified cell obtained from the method of any of the preceding statements, or progeny of said modified cell, wherein said cell comprises a hypoxanthine or a guanine in replace of said Adenine in said target RNA of interest compared to a corresponding cell not subjected to the method.

[1239] 52. The modified cell or progeny thereof of statement 51, wherein said cell is a eukaryotic cell.

[1240] 53. The modified cell or progeny thereof of statement 51, wherein said cell is an animal cell.

[1241] 54. The modified cell or progeny thereof of statement 51, wherein said cell is a human cell.

[1242] 55. The modified cell or progeny thereof of statement 51, wherein said cell is a therapeutic T cell.

[1243] 56. The modified cell or progeny thereof of statement 51, wherein said cell is an antibody-producing B cell.

[1244] 57. The modified cell or progeny thereof of statement 51, wherein said cell is a plant cell.

[1245] 58. A non-human animal comprising said modified cell of statement 51.

[1246] 59. A plant comprising said modified cell of statement 58.

[1247] 60. A method for cell therapy, comprising administering to a patient in need thereof said modified cell of any of statements 51-55, wherein presence of said modified cell remedies a disease in the patient.

[1248] 61. An engineered, non-naturally occurring system suitable for modifying an Adenine in a target locus of interest, comprising
[1249] a) a guide molecule which comprises a guide sequence linked to a direct repeat sequence, or a nucleotide sequence encoding said guide molecule;
[1250] b) a catalytically inactive Cas13 protein, or a nucleotide sequence encoding said catalytically inactive Cas13 protein;
[1251] c) an adenosine deaminase protein or catalytic domain thereof, or a nucleotide sequence encoding said adenosine deaminase protein or catalytic domain thereof;
   wherein said adenosine deaminase protein or catalytic domain thereof is covalently or non-covalently linked to said Cas13 protein or said guide molecule or is adapted to link thereto after delivery;
   wherein said guide sequence is capable of hybridizing with a target RNA sequence comprising an Adenine to form an RNA duplex, wherein said guide sequence comprises a non-pairing Cytosine at a position corresponding to said Adenine resulting in an A-C mismatch in the RNA duplex formed.

[1252] 62. An engineered, non-naturally occurring vector system suitable for modifying an Adenine in a target locus of interest, comprising the nucleotide sequences of a), b) and c) of statement 61.

[1253] 63. The engineered, non-naturally occurring vector system of statement 62, comprising one or more vectors comprising:
[1254] a) a first regulatory element operably linked to a nucleotide sequence encoding said guide molecule which comprises said guide sequence,
[1255] b) a second regulatory element operably linked to a nucleotide sequence encoding said catalytically inactive Cas13 protein; and
[1256] c) a nucleotide sequence encoding an adenosine deaminase protein or catalytic domain thereof which is under control of said first or second regulatory element or operably linked to a third regulatory element;
   wherein, if said nucleotide sequence encoding an adenosine deaminase protein or catalytic domain thereof is operably linked to a third regulatory element, said adenosine deaminase protein or catalytic domain thereof is adapted to link to said guide molecule or said Cas13 protein after expression;
   wherein components (a), (b) and (c) are located on the same or different vectors of the system.

[1257] 64. An in vitro or ex vivo host cell or progeny thereof or cell line or progeny thereof comprising the system of any of statements 61-63.

[1258] 65. The host cell or progeny thereof or cell line or progeny thereof of statement 64, wherein said cell is a eukaryotic cell.

[1259] 66. The host cell or progeny thereof or cell line or progeny thereof of statement 64, wherein said cell is an animal cell.

[1260] 67. The host cell or progeny thereof or cell line or progeny thereof of statement 64, wherein said cell is a human cell.

[1261] 68. The host cell or progeny thereof or cell line or progeny thereof of statement 64, wherein said cell is a plant cell.

[1262] 69. The method according to statement 1, wherein said cytosine is not 5′ flanked by guanosine.

[1263] 70. The method according to statement 1, wherein said adenosine deaminase is ADAR, optionally huADAR, optionally (hu)ADAR1 or (hu)ADAR2, preferably huADAR2.

[1264] 71. The method according to statement 1, wherein said Cas13, preferably Cas13b, is truncated, preferably C-terminally truncated, preferably wherein said Cas 13 is a truncated functional variant of the corresponding wild type Cas13.

[1265] 72. The method according to statement 1, wherein said adenosine deaminase is an RNA specific adenosine deaminase.

[1266] 73. The method according to statement 1 or 16, wherein said adenosine deaminase protein or catalytic domain thereof has been modified to comprise one or more mutation of the ADAR, preferably a mutation as described herein, for instance a mutation as provided in any of FIGS. 43A-43D, 44, 45, 46A-46B, and 47A-47B, or a corresponding mutation in an ADAR homologue or orthologue.

[1267] 74. An engineered, non-naturally occurring system suitable for modifying post-translational modification sites on a protein encoded by a target RNA, comprising: (a) a catalytically inactive (dead) Cas13 protein, or a nucleotide sequence encoding said dead Cas13; (b) a nucleotide deaminase protein or catalytic domain thereof, or a nucleotide sequence encoding said nucleotide deaminase protein or catalytic domain thereof; (b) a guide molecule comprising a guide sequence designed to have a degree of complementarity with a target sequence at one or more codons that comprises an adenine or cytidine and encodes an amino acid that is post-translationally modified; wherein said nucleotide deaminase or catalytic domain thereof is covalently or non-covalently linked to said dead Cas13 protein or said guide molecule, or is adapted to link thereto after delivery.

[1268] 75. The system of statement 74, wherein said guide sequence comprises a non-pairing nucleotide at a position corresponding to said adenosine or cytidine resulting in a mismatch in a RNA duplex formed.

[1269] 76. The system of statement 74 or 75, wherein the system a particle delivery system comprising a ribonucleoprotein complex comprising (a), (b), and (c) encapsulated within or otherwise attached to a delivery particle, the delivery particle further optionally comprising a tissue-specific, cell-specific and/or cell compartment-specific targeting molecule.

[1270] 77. The system of any one of statements 74-76, where the system comprises a vector system comprising one or more vectors comprising: (i) a first regulatory element operably linked to a nucleotide sequence encoding said guide molecule which comprises said guide sequence; (ii) a second regulatory element operably linked to a nucleotide sequence encoding said dead Cas13 protein; and (iii) a nucleotide sequence encoding the nucleotide deaminase protein or catalytic domain thereof which is under control of said first or second regulatory element or operably linked to a third regulatory element; wherein if said nucleotide sequence encoding the nucleotide deaminase protein or catalytic domain thereof is operably linked to the third regulatory element, said nucleotide deaminase protein or catalytic domain thereof is adapted to link to said guide molecule or said Cas13 protein after expression; and wherein components (i), (ii) and (iii) are located on the same or different vectors of the system, optionally wherein said first, second, and/or third regulatory element is an inducible promoter.

[1271] 78. The system of any one of statements 74-77 wherein the nucleotide deaminase is an adenosine deaminase or a cytidine deaminase.

[1272] 79. The system of any one of statements 74-78, wherein the nucleotide deaminase is an adenosine deaminase.

[1273] 80. The system of statement 79, wherein said adenosine deaminase protein or catalytic domain thereof is an RNA-specific adenosine deaminase and/or is a human, cephalopod, or Drosophila adenosine deaminase protein or catalytic domain thereof, preferably ADAR, optionally huADAR, optionally (hu)ADAR1 or (hu)ADAR2, preferably huADAR2 or catalytic domain thereof.

[1274] 81. The system of statement 79 or 90, wherein said adenosine deaminase protein or catalytic domain thereof has been modified to comprise a mutation at E488, preferably E488Q, of the hADAR2-D amino acid sequence, or a corresponding position in a homologous ADAR protein and/or wherein said adenosine deaminase protein or catalytic domain thereof has been modified to comprise a mutation at T375, preferably T375G of the hADAR2-D amino acid sequence, or a corresponding position in a homologous ADAR protein; or wherein said adenosine deaminase protein or catalytic domain thereof has been modified to comprise a mutation at E1008, preferably E1008Q, of the hADAR1d amino acid sequence, or a corresponding position in a homologous ADAR protein; or wherein said adenosine deaminase protein or catalytic domain thereof has been modified to comprise one or more mutation as provided in any of FIGS. 43A-43D, 44, 45, 46A-46B, 47A-47B, or a corresponding mutation in an ADAR homologue or orthologue.

[1275] 82. The system of any one of statements 74-78, wherein the nucleotide deaminase is an cytidine deaminase.

[1276] 83. The system of statement 82, wherein said cytidine deaminase protein or catalytic domain thereof is a human, rat or lamprey cytidine deaminase protein or catalytic domain thereof.

[1277] 84. The system of statement 82 or 83, wherein said cytidine deaminase protein or catalytic domain thereof is an apolipoprotein B mRNA-editing complex (APOBEC) family deaminase, an activation-induced deaminase (AID), or a cytidine deaminase 1 (CDA1).

[1278] 85. The system of any one of statements 82-84, wherein said cytidine deaminase protein or catalytic domain thereof is an APOBEC1 deaminase comprising one or more mutations corresponding to W90A, W90Y, R118A, H121R, H122R, R126A, R126E, or R132E in rat APOBEC1, or an APOBEC3G deaminase comprising one or more mutations corresponding to W285A, W285Y, R313A, D316R, D317R, R320A, R320E, or R326E in human APOBEC3G.

[1279] 86. The system of any one of statements 82-85, wherein said cytidine deaminase protein or catalytic domain thereof is delivered together with a uracil glycosylase inhibitor (UGI), where said UGI is covalently linked to said cytidine deaminase protein or catalytic domain thereof and/or said catalytically inactive Cas13 protein.

[1280] 87. The system of any one of statements 74-86, wherein said Cas13 protein is Cas13a, Cas13b, or Cas13c, preferably wherein said Cas13 is a Cas13 listed in any of Tables 1, 2, 3, 4, or 6 or is from a bacterial species listed in any of Tables 1, 2, 3, 4, or 6, preferably wherein said Cas13 protein is Prevotella sp. P5-125 Cas13b, Porphyromonas gulae Cas13b, or Riemerella anatipestifer Cas13b; preferably Prevotella sp. P5-125 Cas13b.

[1281] 88. The system of any one of statements 74-87, said nucleotide deaminase protein or catalytic domain thereof is fused to N- or C-terminus of said dead Cas13 protein, optionally by a linker, preferably where said linker is (GGGGS)3-11, GSG5 or LEPGEKPYKCPECGKSFSQSGALTRHQRTHTR, or wherein said linker is an XTEN linker.

[1282] 89. The system of any one of statements 74-88, wherein said nucleotide deaminase protein or catalytic domain thereof is linked to an adaptor protein and said guide molecule or said dead Cas13 protein comprises an aptamer sequence capable of binding to said adaptor protein, preferably wherein said adaptor sequence is selected from MS2, PP7, Qβ, F2, GA, fr, JP501, M12, R17, BZ13, JP34, JP500, KU1, M11, MX1, TW18, VK, SP, FI, ID2, NL95, TW19, AP205, ϕCb5, ϕCb8r, ϕCb12r, ϕCb23r, 7s and PRR1.

[1283] 90. The system of any one of statements 74-89, wherein said nucleotide deaminase protein or catalytic domain thereof is inserted into an internal loop of said dead Cas13 protein.

[1284] 91. The system of any one of statements 74-90, wherein said Cas13 protein is a Cas13a protein and said Cas13a comprises one or more mutations in the two HEPN domains, particularly at positions R474 and R1046 of Cas13a protein originating from Leptotrichia wadei or amino acid positions corresponding thereto of a Cas13a ortholog, or wherein said Cas13 protein is a Cas13b protein and said Cas13b comprises a mutation in one or more of positions R116, H121, R1177, and H1182, preferably R116A, H121A, R1177A, and H1182A of Cas13b protein originating from Bergeyella zoohelcum ATCC 43767 or amino acid positions corresponding thereto of a Cas13b ortholog, or wherein said Cas13 protein is a Cas13b protein and said Cas13b comprises a mutation in one or more of positions R128, H133, R1053, and H1058, preferably H133 and H1058, preferably H133A and H1058A, of a Cas13b protein originating from Prevotella sp. P5-125 or amino acid positions corresponding thereto of a Cas13b ortholog.

[1285] 92. The system of any one of statements 74-91, wherein said guide sequence has a length of from about 20 to about 53 nucleotides (nt), preferably from about 25 to about 53 nt, more preferably from about 29 to about 53 nt, or from about 40 to about 50 nt capable of forming said RNA duplex with said target sequence.

[1286] 93. The system of any one of statements 74-92, wherein the distance between said non-pairing C and the 5′ end of said guide sequence is from about 20 to about 30 nucleotides.

[1287] 94. The system of any one of statements 74-93, wherein said Cas13, preferably Cas13b, is truncated, preferably C-terminally truncated, preferably wherein said Cas13 is a truncated functional variant of the corresponding wild type Cas13, optionally wherein said truncated Cas13b is encoded by nt 1-984 of Prevotella sp. P5-125 Cas13b or the corresponding nt of a Cas13b orthologue or homologue.

[1288] 95. The system of any one of statements 74-94, wherein the guide sequence comprises more than one mismatch corresponding to different adenosine or cytidine sites in the target RNA sequence or wherein two guide molecules are used, each comprising a mismatch corresponding to a different adenosine or cytidine sites in the target RNA sequence.

[1289] 96. The system of any one of statements 74-95, wherein said Cas13 protein and optionally said nucleotide deaminase protein or catalytic domain thereof comprise one or more heterologous nuclear export signal(s) (NES(s)) or nuclear localization signal(s) (NLS(s)), preferably an HIV Rev NES or MAPK NES, preferably C-terminal.

[1290] 97. The system of any one of statements 74-96, said target RNA sequence of interest is within a cell, preferably a eukaryotic cell, most preferably a human or non-human animal cell, or a plant cell.

[1291] 98. The system of any one of statements 74-97, wherein the nucleotide deaminase is lined to the dead Cas13 via one or more amino acids in amino acids 411-429, 114-124, 197-241, and 607-624.

[1292] 99. A method of modifying post-translational modification sites on a protein encoded by a target RNA comprising: contacting the target RNA with the system of any one of any one of statements 74-98.

[1293] 100. The method of statement 99, wherein (a), (b), and (c) are delivered or are to be delivered as one or more polynucleotide molecules, as a ribonucleoprotein complex, optionally via particles, vesicles, or one or more viral vectors.

[1294] 101. The system of any one of statements 74-98 or the method of statement 99 or 100, for use in prophylactic or therapeutic treatment, preferably wherein said target locus of interest is within a human or animal.

[1295] 102. The system of any one of statements 74-98 or the method of any one of statements 99-101, for use in the treatment or prevention of a disease caused by transcripts containing a pathogenic G→A or C→T point mutation.

[1296] 103. The system or method of statement 102, wherein said disease is selected from Meier-Gorlin syndrome, Seckel syndrome 4, Joubert syndrome 5, Leber congenital amaurosis 10; Charcot-Marie-Tooth disease, type 2; Charcot-Marie-Tooth disease, type 2; Usher syndrome, type 2C; Spinocerebellar ataxia 28; Spinocerebellar ataxia 28; Spinocerebellar ataxia 28; Long QT syndrome 2; Sjögren-Larsson syndrome; Hereditary fructosuria; Hereditary fructosuria; Neuroblastoma; Neuroblastoma; Kallmann syndrome 1; Kallmann syndrome 1; Kallmann syndrome 1; Metachromatic leukodystrophy, Rett syndrome, Amyotrophic lateral sclerosis type 10, Li-Fraumeni syndrome, or a disease listed in Table 5; or wherein said disease is a premature termination disease or cancer.

[1297] 104. The system of any one of statements 74-98 or the method of any one of statements 99-101, wherein said modification affects the fertility of an organism, wherein said modification affects splicing of said target RNA sequence, wherein said modification introduces a mutation in a transcript introducing an amino acid change and causing expression of a new antigen in a cancer cell, wherein said deamination of said Adenine in said target RNA of interest causes a gain of function or a loss of function of a gene.

[1298] 105. The system of any one of statements 74-98 or the method of any one of statements 99-101, wherein the modification silences ubiquitination, methylation, acetylation, succinylation, glycosylation, 0-GlcNAc, O-linked glycosylation, iodination, nitrosylation, sulfation, caboxyglutamation, phosphorylation, or a combination thereof 106. The system of any one of statements 74-98 or the method of any one of statements 99-101, wherein the modification prevents pathological activated cell-signaling mediated by the post-translational modification.

[1299] 107. The system of any one of statements 74-98 or the method of any one of statements 99-101, wherein said modification increases or decreases a half-life of a target protein by modifying a degron encoded by the target nucleic acid sequence.

[1300] 108. A cell obtained from the method of any of the preceding statements and/or comprising the system of any of the preceding statements, or progeny of said modified cell, preferably wherein said cell comprises a hypoxanthine or a guanine in replace of said Adenine in said target RNA of interest compared to a corresponding cell not subjected to the method of any of the preceding statements.

[1301] 109. The cell of statement 108 or a progeny thereof, wherein said cell is a eukaryotic cell, preferably a human or non-human animal cell, optionally a therapeutic T cell or an antibody-producing B-cell or wherein said cell is a plant cell.

[1302] 110. A non-human animal comprising said cell of statement 108 or 109 or a progeny thereof.

[1303] 111. A plant comprising said cell of statement 108 or 109 or a progeny.

[1304] 112. A modified cell according to statement 108 or 109 for use in therapy, preferably cell therapy.

[1305] 113. A method for treating a disease in a subject comprising administering the system described herein to the subject.

[1306] 114. A method for treating a disease in a subject comprising administering a cell, a population of cells, a tissue, or an organ that comprise the system described herein to the subject.

### REFERENCES

[1307] 1. P. D. Hsu, E. S. Lander, F. Zhang, Development and applications of CRISPR-Cas9 for genome engineering. Cell 157, 1262-1278 (2014).
[1308] 2. A. C. Komor, A. H. Badran, D. R. Liu, CRISPR-Based Technologies for the Manipulation of Eukaryotic Genomes. Cell 168, 20-36 (2017).
[1309] 3. L. Cong et al., Multiplex genome engineering using CRISPR/Cas systems. Science 339, 819-823 (2013).
[1310] 4. P. Mali et al., RNA-guided human genome engineering via Cas9. Science 339, 823-826 (2013).
[1311] 5. B. Zetsche et al., Cpf1 is a single RNA-guided endonuclease of a class 2 CRISPR-Cas system. Cell 163, 759-771 (2015).
[1312] 6. H. Kim, J. S. Kim, A guide to genome engineering with programmable nucleases. Nat Rev Genet 15, 321-334 (2014).
[1313] 7. A. C. Komor, Y. B. Kim, M. S. Packer, J. A. Zuris, D. R. Liu, Programmable editing of a target base in genomic DNA without double-stranded DNA cleavage. Nature 533, 420-424 (2016).
[1314] 8. K. Nishida et al., Targeted nucleotide editing using hybrid prokaryotic and vertebrate adaptive immune systems. Science 353, (2016).
[1315] 9. Y. B. Kim et al., Increasing the genome-targeting scope and precision of base editing with engineered Cas9-cytidine deaminase fusions. Nat Biotechnol 35, 371-376 (2017).
[1316] 10. O. O. Abudayyeh et al., C2c2 is a single-component programmable RNA-guided RNA-targeting CRISPR effector. Science 353, aaf5573 (2016).
[1317] 11. S. Shmakov et al., Discovery and Functional Characterization of Diverse Class 2 CRISPR-Cas Systems. Mol Cell 60, 385-397 (2015).
[1318] 12. S. Shmakov et al., Diversity and evolution of class 2 CRISPR-Cas systems. Nat Rev Microbiol 15, 169-182 (2017).
[1319] 13. A. A. Smargon et al., Cas13b Is a Type VI-B CRISPR-Associated RNA-Guided RNase Differentially Regulated by Accessory Proteins Csx27 and Csx28. Mol Cell 65, 618-630 e617 (2017).
[1320] 14. J. S. Gootenberg et al., Nucleic acid detection with CRISPR-Cas13a/C2c2. Science 356, 438-442 (2017).
[1321] 15. 0. O. Abudayyeh et al., RNA targeting with CRISPR-Cas13a. Nature in press, (2017).
[1322] 16. K. Nishikura, Functions and regulation of RNA editing by ADAR deaminases. Annu Rev Biochem 79, 321-349 (2010).
[1323] 17. M. H. Tan et al., Dynamic landscape and regulation of RNA editing in mammals. Nature 550, 249-254 (2017)
[1324] 18. B. L. Bass, H. Weintraub, An unwinding activity that covalently modifies its double-stranded RNA substrate. Cell 55, 1089-1098 (1988).
[1325] 19. M. M. Matthews et al., Structures of human ADAR2 bound to dsRNA reveal base-flipping mechanism and basis for site selectivity. Nat Struct Mol Biol 23, 426-433 (2016).
[1326] 20. Y. Zheng, C. Lorenzo, P. A. Beal, DNA editing in DNA/RNA hybrids by adenosine deaminases that act on RNA. Nucleic Acids Res 45, 3369-3377 (2017).
[1327] 21. A. Kuttan, B. L. Bass, Mechanistic insights into editing-site specificity of ADARs. Proc Natl Acad Sci USA 109, E3295-3304 (2012).
[1328] 22. S. K. Wong, S. Sato, D. W. Lazinski, Substrate recognition by ADAR1 and ADAR2. RNA 7, 846-858 (2001).
[1329] 23. M. Fukuda et al., Construction of a guide-RNA for site-directed RNA mutagenesis utilising intracellular A-to-I RNA editing. Sci Rep 7, 41478 (2017).
[1330] 24. M. F. Montiel-Gonzalez, I. Vallecillo-Viejo, G. A. Yudowski, J. J. Rosenthal, Correction of mutations within the cystic fibrosis transmembrane conductance regulator by site-directed RNA editing. Proc Natl Acad Sci USA 110, 18285-18290 (2013).
[1331] 25. M. F. Montiel-Gonzalez, I. C. Vallecillo-Viejo, J. J. Rosenthal, An efficient system for selectively altering genetic information within mRNAs. Nucleic Acids Res 44, e157 (2016).
[1332] 26. J. Wettengel, P. Reautschnig, S. Geisler, P. J. Kahle, T. Stafforst, Harnessing human ADAR2 for RNA repair—Recoding a PINK1 mutation rescues mitophagy. Nucleic Acids Res 45, 2797-2808 (2017).
[1333] 27. Y. Wang, J. Havel, P. A. Beal, A Phenotypic Screen for Functional Mutants of Human Adenosine Deaminase Acting on RNA 1. ACS Chem Biol 10, 2512-2519 (2015).
[1334] 28. K. A. Lehmann, B. L. Bass, Double-stranded RNA adenosine deaminases ADAR1 and ADAR2 have overlapplng specificities. Biochemistry 39, 12875-12884 (2000).
[1335] 29. T. Stafforst, M. F. Schneider, An RNA-deaminase conjugate selectively repairs point mutations. Angew Chem Int Ed Engl 51, 11166-11169 (2012).
[1336] 30. C. Ballatore, V. M. Lee, J. Q. Trojanowski, Tau-mediated neurodegeneration in Alzheimer's disease and related disorders. Nat Rev Neurosci 8, 663-672 (2007).
[1337] 31. Y. Li et al., Carriers of rare missense variants in IFIH1 are protected from psoriasis. J Invest Dermatol 130, 2768-2772 (2010).
[1338] 32. R. S. Finkel et al., Treatment of infantile-onset spinal muscular atrophy with nusinersen: a phase 2, open-label, dose-escalation study. Lancet 388, 3017-3026 (2016).
[1339] 33. J. Joung et al., Genome-scale CRISPR-Cas9 knockout and transcriptional activation screening. Nat Protoc 12, 828-863 (2017).
[1340] 34. B. Li, C. N. Dewey, RSEM: accurate transcript quantification from RNA-Seq data with or without a reference genome. BMC Bioinformatics 12, 323 (2011).
[1341] 35. E. Picardi, A. M. D'Erchia, A. Montalvo, G. Pesole, Using REDItools to Detect RNA Editing Events in NGS Datasets. Curr Protoc Bioinformatics 49, 12 12 11-15 (2015).
[1342] 36. E. Picardi, G. Pesole, REDItools: high-throughput RNA editing detection made easy. Bioinformatics 29, 1813-1814 (2013).
[1343] 37. G. Glusman, J. Caballero, D. E. Mauldin, L. Hood, J. C. Roach, Kaviar: an accessible system for testing SNV novelty. Bioinformatics 27, 3216-3217 (2011).
[1344] 38. J. D. Watson, Molecular biology of the gene. (Pearson, Boston, ed. Seventh edition, 2014), pp. xxxiv, 872 pages.
[1345] 39. R. C. Ferreira et al., Association of IFIH1 and other autoimmunity risk alleles with selective IgA deficiency. Nat Genet 42, 777-780 (2010).

[1346] Various modifications and variations of the described methods, pharmaceutical compositions, and kits of the invention will be apparent to those skilled in the art without departing from the scope and spirit of the invention. Although the invention has been described in connection with specific embodiments, it will be understood that it is capable of further modifications and that the invention as claimed should not be unduly limited to such specific embodiments. Indeed, various modifications of the described modes for carrying out the invention that are obvious to those skilled in the art are intended to be within the scope of the invention. This application is intended to cover any variations, uses, or adaptations of the invention following, in general, the principles of the invention and including such departures from the present disclosure come within known customary practice within the art to which the invention pertains and may be applied to the essential features herein before set forth.

What is claimed is:

1. An engineered, non-naturally occurring system suitable for modifying post-translational modification sites on a protein encoded by a target RNA, comprising:
a. a catalytically inactive (dead) Cas13 protein, or a nucleotide sequence encoding said dead Cas13;
b. a nucleotide deaminase protein or catalytic domain thereof, or a nucleotide sequence encoding said nucleotide deaminase protein or catalytic domain thereof;
c. a guide molecule comprising a guide sequence designed to have a degree of complementarity with a target sequence at one or more codons that comprises an adenine or cytidine and encodes an amino acid that is post-translationally modified;
wherein said nucleotide deaminase or catalytic domain thereof is covalently or non-covalently linked to said dead Cas13 protein or said guide molecule, or is adapted to link thereto after delivery.

2. The system of claim 1, wherein said guide sequence comprises a non-pairing nucleotide at a position corresponding to said adenosine or cytidine resulting in a mismatch in a RNA duplex formed.

3. The system of claim 1, wherein the system a particle delivery system comprising a ribonucleoprotein complex comprising (a), (b), and (c) encapsulated within or otherwise attached to a delivery particle, the delivery particle further optionally comprising a tissue-specific, cell-specific and/or cell compartment-specific targeting molecule.

4. The system of claim 1, where the system comprises a vector system comprising one or more vectors comprising:
i) a first regulatory element operably linked to a nucleotide sequence encoding said guide molecule which comprises said guide sequence;
ii) a second regulatory element operably linked to a nucleotide sequence encoding said dead Cas13 protein; and
iii) a nucleotide sequence encoding the nucleotide deaminase protein or catalytic domain thereof which is under control of said first or second regulatory element or operably linked to a third regulatory element;
wherein if said nucleotide sequence encoding the nucleotide deaminase protein or catalytic domain thereof is operably linked to the third regulatory element, said nucleotide deaminase protein or catalytic domain thereof is adapted to link to said guide molecule or said Cas13 protein after expression; and
wherein components (i), (ii) and (iii) are located on the same or different vectors of the system, optionally wherein said first, second, and/or third regulatory element is an inducible promoter.

5. The system of claim 1, wherein the nucleotide deaminase is an adenosine deaminase or a cytidine deaminase.

6. The system of claim 5, wherein the nucleotide deaminase is an adenosine deaminase.

7. The system of claim 6, wherein said adenosine deaminase protein or catalytic domain thereof is an RNA-specific adenosine deaminase and/or is a human, cephalopod, or Drosophila adenosine deaminase protein or catalytic domain thereof, preferably ADAR, optionally huADAR, optionally (hu)ADAR1 or (hu)ADAR2, preferably huADAR2 or catalytic domain thereof.

8. The system of claim 6, wherein said adenosine deaminase protein or catalytic domain thereof has been modified to comprise a mutation at E488, preferably E488Q, of the hADAR2-D amino acid sequence, or a corresponding position in a homologous ADAR protein and/or wherein said adenosine deaminase protein or catalytic domain thereof has been modified to comprise a mutation at T375, preferably T375G of the hADAR2-D amino acid sequence, or a corresponding position in a homologous ADAR protein; or wherein said adenosine deaminase protein or catalytic domain thereof has been modified to comprise a mutation at E1008, preferably E1008Q, of the hADAR1d amino acid sequence, or a corresponding position in a homologous ADAR protein; or wherein said adenosine deaminase protein or catalytic domain thereof has been modified to comprise one or more mutation as provided in any of FIGS. 43A-43D, 44, 45, 46A-46B, 47A-47B, or a corresponding mutation in an ADAR homologue or orthologue.

9. The system of claim 5, wherein the nucleotide deaminase is an cytidine deaminase.

10. The system of claim 9, wherein said cytidine deaminase protein or catalytic domain thereof is a human, rat or lamprey cytidine deaminase protein or catalytic domain thereof.

11. The system of claim 9, wherein said cytidine deaminase protein or catalytic domain thereof is an apolipoprotein B mRNA-editing complex (APOBEC) family deaminase, an activation-induced deaminase (AID), or a cytidine deaminase 1 (CDA1).

12. The system of claim 9, wherein said cytidine deaminase protein or catalytic domain thereof is an APOBEC1 deaminase comprising one or more mutations corresponding to W90A, W90Y, R118A, H121R, H122R, R126A, R126E, or R132E in rat APOBEC1, or an APOBEC3G deaminase comprising one or more mutations corresponding to W285A, W285Y, R313A, D316R, D317R, R320A, R320E, or R326E in human APOBEC3G.

13. The system of claim 9, wherein said cytidine deaminase protein or catalytic domain thereof is delivered together with a uracil glycosylase inhibitor (UGI), where said UGI is covalently linked to said cytidine deaminase protein or catalytic domain thereof and/or said catalytically inactive Cas13 protein.

14. The system of claim 1, wherein said Cas13 protein is Cas13a, Cas13b, or Cas13c, preferably wherein said Cas13 is a Cas13 listed in any of Tables 1, 2, 3, 4, or 6 or is from a bacterial species listed in any of Tables 1, 2, 3, 4, or 6, preferably wherein said Cas13 protein is Prevotella sp. P5-125 Cas13b, Porphyromonas gulae Cas13b, or Riemerella anatipestifer Cas13b; preferably Prevotella sp. P5-125 Cas13b.

15. The system of claim 1, said nucleotide deaminase protein or catalytic domain thereof is fused to N- or C-terminus of said dead Cas13 protein, optionally by a linker, preferably where said linker is (GGGGS)₃₋₁₁, GSG₅ or LEPGEKPYKCPECGKSFSQSGALTRHQRTHTR, or wherein said linker is an XTEN linker.

16. The system of claim 1, wherein said nucleotide deaminase protein or catalytic domain thereof is linked to an adaptor protein and said guide molecule or said dead Cas13 protein comprises an aptamer sequence capable of binding to said adaptor protein, preferably wherein said adaptor sequence is selected from MS2, PP7, Qβ, F2, GA, fr, JP501, M12, R17, BZ13, JP34, JP500, KU1, M11, MX1, TW18, VK, SP, FI, ID2, NL95, TW19, AP205, ϕCb5, ϕCb8r, ϕCb12r, ϕCb23r, 7s and PRR1.

17. The system of claim 1, wherein said nucleotide deaminase protein or catalytic domain thereof is inserted into an internal loop of said dead Cas13 protein.

18. The system of claim 1, wherein said Cas13 protein is a Cas13a protein and said Cas13a comprises one or more mutations in the two HEPN domains, particularly at positions R474 and R1046 of Cas13a protein originating from Leptotrichia wadei or amino acid positions corresponding thereto of a Cas13a ortholog, or wherein said Cas13 protein is a Cas13b protein and said Cas13b comprises a mutation in one or more of positions R116, H121, R1177, and H1182, preferably R116A, H121A, R1177A, and H1182A of Cas13b protein originating from Bergeyella zoohelcum ATCC 43767 or amino acid positions corresponding thereto of a Cas13b ortholog, or wherein said Cas13 protein is a Cas13b protein and said Cas13b comprises a mutation in one or more of positions R128, H133, R1053, and H1058, preferably H133 and H1058, preferably H133A and H1058A, of a Cas13b protein originating from Prevotella sp. P5-125 or amino acid positions corresponding thereto of a Cas13b ortholog.

19. The system of claim 1, wherein said guide sequence has a length of from about 20 to about 53 nucleotides (nt), preferably from about 25 to about 53 nt, more preferably from about 29 to about 53 nt, or from about 40 to about 50 nt capable of forming said RNA duplex with said target sequence.

20. The system of claim 1, wherein the distance between said non-pairing C and the 5′ end of said guide sequence is from about 20 to about 30 nucleotides.

21. The system of claim 1, wherein said Cas13, preferably Cas13b, is truncated, preferably C-terminally truncated, preferably wherein said Cas13 is a truncated functional variant of the corresponding wild type Cas13, optionally wherein said truncated Cas13b is encoded by nt 1-984 of Prevotella sp. P5-125 Cas13b or the corresponding nt of a Cas13b orthologue or homologue.

22. The system of claim 1, wherein the guide sequence comprises more than one mismatch corresponding to different adenosine or cytidine sites in the target RNA sequence or wherein two guide molecules are used, each comprising a mismatch corresponding to a different adenosine or cytidine sites in the target RNA sequence.

23. The system of claim 1, wherein said Cas13 protein and optionally said nucleotide deaminase protein or catalytic domain thereof comprise one or more heterologous nuclear export signal(s) (NES(s)) or nuclear localization signal(s) (NLS(s)), preferably an HIV Rev NES or MAPK NES, preferably C-terminal.

24. The system of claim 1, said target RNA sequence of interest is within a cell, preferably a eukaryotic cell, most preferably a human or non-human animal cell, or a plant cell.

25. The system of claim 1, wherein the nucleotide deaminase is lined to the dead Cas13 via one or more amino acids in amino acids 411-429, 114-124, 197-241, and 607-624.

26. A method of modifying post-translational modification sites on a protein encoded by a target RNA comprising:
contacting the target RNA with the system of any one of claims 1 to 25.

27. The method of claim 26, wherein (a), (b), and (c) are delivered or are to be delivered as one or more polynucleotide molecules, as a ribonucleoprotein complex, optionally via particles, vesicles, or one or more viral vectors.

28. The system of claim 1 or the method of claim 26, for use in prophylactic or therapeutic treatment, preferably wherein said target locus of interest is within a human or animal.

29. The system of claim 1 or the method of claim 26, for use in the treatment or prevention of a disease caused by transcripts containing a pathogenic G→A or C→T point mutation.

30. The system or method of claim 29, wherein said disease is selected from Meier-Gorlin syndrome, Seckel syndrome 4, Joubert syndrome 5, Leber congenital amaurosis 10; Charcot-Marie-Tooth disease, type 2; Charcot-Marie-Tooth disease, type 2; Usher syndrome, type 2C; Spinocerebellar ataxia 28; Spinocerebellar ataxia 28; Spinocerebellar ataxia 28; Long QT syndrome 2; Sjögren-Larsson syndrome; Hereditary fructosuria; Hereditary fructosuria; Neuroblastoma; Neuroblastoma; Kallmann syndrome 1; Kallmann syndrome 1; Kallmann syndrome 1; Metachromatic leukodystrophy, Rett syndrome, Amyotrophic lateral sclerosis type 10, Li-Fraumeni syndrome, or a disease listed in Table 5; or wherein said disease is a premature termination disease or cancer.

31. The system of claim 1 or the method of claim 26, wherein said modification affects the fertility of an organism, wherein said modification affects splicing of said target RNA sequence, wherein said modification introduces a mutation in a transcript introducing an amino acid change and causing expression of a new antigen in a cancer cell, wherein said deamination of said Adenine in said target RNA of interest causes a gain of function or a loss of function of a gene.

32. The system of claim 1 or the method of claim 26, wherein the modification silences ubiquitination, methylation, acetylation, succinylation, glycosylation, O-GlcNAc, 0-linked glycosylation, iodination, nitrosylation, sulfation, caboxyglutamation, phosphorylation, or a combination thereof.

33. The system of claim 1 or the method of claim 26, wherein the modification prevents pathological activated cell-signaling mediated by the post-translational modification.

34. The system of claim 1 or the method of claim 26, wherein said modification increases or decreases a half-life of a target protein by modifying a degron encoded by the target nucleic acid sequence.

35. A cell obtained from the method of any of the preceding claims and/or comprising the system of any of the preceding claims, or progeny of said modified cell, preferably wherein said cell comprises a hypoxanthine or a guanine in replace of said Adenine in said target RNA of interest compared to a corresponding cell not subjected to the method.

36. The cell of claim 35 or a progeny thereof, wherein said cell is a eukaryotic cell, preferably a human or non-human animal cell, optionally a therapeutic T cell or an antibody-producing B-cell or wherein said cell is a plant cell.

37. A non-human animal comprising said cell of claim 35 or 36 or a progeny thereof.

38. A plant comprising said cell of claim 35 or 36 or a progeny.

39. A modified cell according to claim 35 or 36 for use in therapy, preferably cell therapy.

The application's sequence listing, which the Patent Office published only in electronic form, follows.

SEQUENCE LISTING (834 sequences)

SEQ ID NO: 1 - protein, 15 aa, Artificial Sequence
  Synthetic
GGGGSGGGGSGGGGS

SEQ ID NO: 2 - protein, 20 aa, Artificial Sequence
  Synthetic
GGGGSGGGGSGGGGSGGGGS

SEQ ID NO: 3 - protein, 25 aa, Artificial Sequence
  Synthetic
GGGGSGGGGSGGGGSGGGGSGGGGS

SEQ ID NO: 4 - protein, 30 aa, Artificial Sequence
  Synthetic
GGGGSGGGGSGGGGSGGGGSGGGGSGGGGS

SEQ ID NO: 5 - protein, 35 aa, Artificial Sequence
  Synthetic
GGGGSGGGGSGGGGSGGGGSGGGGSGGGGSGGGGS

SEQ ID NO: 6 - protein, 40 aa, Artificial Sequence
  Synthetic
GGGGSGGGGSGGGGSGGGGSGGGGSGGGGSGGGGSGGGGS

SEQ ID NO: 7 - protein, 45 aa, Artificial Sequence
  Synthetic
GGGGSGGGGSGGGGSGGGGSGGGGSGGGGSGGGGSGGGGSGGGGS

SEQ ID NO: 8 - protein, 50 aa, Artificial Sequence
  Synthetic
GGGGSGGGGSGGGGSGGGGSGGGGSGGGGSGGGGSGGGGSGGGGSGGGGS

SEQ ID NO: 9 - protein, 55 aa, Artificial Sequence
  Synthetic
GGGGSGGGGSGGGGSGGGGSGGGGSGGGGSGGGGSGGGGSGGGGSGGGGSGGGGS

SEQ ID NO: 10 - protein, 15 aa, Artificial Sequence
  Synthetic
GSGGSGGSGGSGGSG

SEQ ID NO: 11 - protein, 32 aa, Artificial Sequence
  Synthetic
LEPGEKPYKCPECGKSFSQSGALTRHQRTHTR

SEQ ID NO: 12 - protein, 9 aa, Artificial Sequence
  Synthetic
GGSGGSGGS

SEQ ID NO: 13 - protein, 60 aa, Artificial Sequence
  Synthetic
GGGGSGGGGSGGGGSGGGGSGGGGSGGGGSGGGGSGGGGSGGGGSGGGGSGGGGSGGGGS

SEQ ID NO: 14 - protein, 5 aa, Artificial Sequence
  Synthetic
GGGGS

SEQ ID NO: 15 - protein, 10 aa, Artificial Sequence
  Synthetic
GGGGSGGGGS

SEQ ID NO: 16 - protein, 20 aa, Artificial Sequence
  Synthetic
PKKKRKVEASSPKKRKVEAS

SEQ ID NO: 17 - protein, 7 aa, SV40
PKKKRKV

SEQ ID NO: 18 - protein, 10 aa, Artificial Sequence
  Synthetic
PKKKRKVEAS

SEQ ID NO: 19 - protein, 16 aa, Artificial Sequence
  Synthetic
KRPAATKKAGQAKKKK

SEQ ID NO: 20 - protein, 9 aa, Artificial Sequence
  Synthetic
PAAKRVKLD

SEQ ID NO: 21 - protein, 11 aa, Artificial Sequence
  Synthetic
RQRRNELKRSP

SEQ ID NO: 22 - protein, 38 aa, Artificial Sequence
  Synthetic
NQSSNFGPMKGGNFGGRSSGPYGGGGQYFAKPRNQGGY

SEQ ID NO: 23 - protein, 42 aa, Artificial Sequence
  Synthetic
RMRIZFKNKGKDTAELRRRRVEVSVELRKAKKDEQILKRRNV

SEQ ID NO: 24 - protein, 8 aa, Artificial Sequence
  Synthetic
VSRKRPRP

SEQ ID NO: 25 - protein, 8 aa, Artificial Sequence
  Synthetic
PPKKARED

SEQ ID NO: 26 - protein, 8 aa, Homo sapiens
PQPKKKPL

SEQ ID NO: 27 - protein, 12 aa, Mus
SALIKKKKKMAP

SEQ ID NO: 28 - protein, 5 aa, Influenza virus
DRLRR

SEQ ID NO: 29 - protein, 7 aa, Influenza virus
PKQKKRK

SEQ ID NO: 30 - protein, 10 aa, Hepatitis virus
RKLKKKIKKL

SEQ ID NO: 31 - protein, 10 aa, Mus
REKKKFLKRR

SEQ ID NO: 32 - protein, 20 aa, Homo sapiens
KRKGDEVDGVDEVAKKKSKK

SEQ ID NO: 33 - protein, 17 aa, Homo sapiens
RKCLQAGMNLEARKTKK

SEQ ID NO: 34 - protein, 1340 aa, Lachnospiracea sp
MQISKVNHKHVAVGQKDRERITGFIYNDPVGDEKSLEDVVAKRANDTKVLFNVFNTKDLYDSQESDKSEKDKEIISKGAKFVAKSFNSAITILKKQNKIYSTLTSQQVIKELKDKFGGARIYDDDIEEALTETLKKSFRKENVRNSIKVLIENAAGIRSSLSKDEEELIQEYFVKQLVEEYTKTKLQKNVVKSIKNQNMVIQPDSDSQVLSLSESRREKQSSAVSSDTLVNCKEKDVLKAFLTDYAVLDEDERNSLLWKLRNLVNLYFYGSESIRDYSYTKEKSVWKEHDEQKANKTLFIDEICHITKIGKNGKEQKVLDYEENRSRCRKQNINYYRSALNYAKNNTSGIFENEDSNHFWIHLIENEVERLYNGIENGEEFKFETGYISEKVWKAVINHLSIKYIALGKAVYNYAMKELSSPGDIEPGKIDDSYINGITSFDYEIIKAEESLQRDISMNVVFATNYLACATVDTDKDFLLFSKEDIRSCTKKDGNLCKNIMQFWGGYSTWKNFCEEYLKDDKDALELLYSLKSMLYSMRNSSFHFSTENVDNGSWDTELIGKLFEEDCNRAARIEKEKFYNNNLHMFYSSSLLEKVLERLYSSHHERASQVPSFNRVFVRKNFPSSLSEQRITPKFTDSKDEQIWQSAVYYLCKEIYYNDFLQSKEAYKLFREGVKNLDKNDINNQKAADSFKQAVVYYGKAIGNATLSQVCQAIMTEYNRQNNDGLKKKSAYAEKQNSNKYKHYPLFLKQVLQSAFWEYLDENKEIYGFISAQIHKSNVEIKAEDFIANYSSQQYKKLVDKVKKTPELQKWYTLGRLINPRQANQFLGSIRNYVQFVKDIQRRAKENGNPIRNYYEVLESDSIIKILEMCTKLNGTTSNDIHDYFRDEDEYAEYISQFVNFGDVHSGAALNAFCNSESEGKKNGIYYDGINPIVNRNWVLCKLYGSPDLISKIISRVNENMIHDFHKQEDLIREYQIKGICSNKKEQQDLRTFQVLKNRVELRDIVEYSEIINELYGQLIKWCYLRERDLMYFQLGFHYLCLNNASSKEADYIKINVDDRNISGAILYQIAAMYINGLPVYYKKDDMYVALKSGKKASDELNSNEQTSKKINYFLKYGNNILGDKKDQLYLAGLELFENVAEHENIIIFRNEIDHFHYFYDRDRSMLDLYSEVFDRFFTYDMKLRKNVVNMLYNILLDHNIVSSFVFETGEKKVGRGDSEVIKPSAKIRLRANNGVSSDVFTYKVGSKDELKIATLPAKNEEFLLNVARLIYYPDMEAVSENMVREGVVKVEKSNDKKGKISRGSNTRSSNQSKYNNKSKNRMNYSMGSIFEKMDLKFD

SEQ ID NO: 35 - protein, 1437 aa, Lachnospiracea NK4A179
MKISKVREENRGAKLTVNAKTAVVSENRSQEGILYNDPSRYGKSRKNDEDRDRYIESRLKSSGKLYRIFNEDKNKRETDELQWFLSEIVKKINRRNGLVLSDMLSVDDRAFEKAFEKYAELSYTNRRNKVSGSPAFETCGVDAATAERLKGIISETNFINRIKNNIDNKVSEDIIDRIIAKYLKKSLCRERVKRGLKKLLMNAFDLPYSDPDIDVQRDFIDYVLEDFYHVRAKSQVSRSIKNMNMPVQPEGDGKFAITVSKGGTESGNKRSAEKEAFKKFLSDYASLDERVRDDMLRRMRRLVVLYFYGSDDSKLSDVNEKFDVWEDHAARRVDNREFIKLPLENKLANGKTDKDAERIRKNTVKELYRNQNIGCYRQAVKAVEEDNNGRYFDDKMLNMFFIHRIEYGVEKIYANLKQVTEFKARTGYLSEKIWKDLINYISIKYIAMGKAVYNYAMDELNASDKKEIELGKISEEYLSGISSFDYELIKAEEMLQRETAVYVAFAARHLSSQTVELDSENSDFLLLKPKGTMDKNDKNKLASNNILNFLKDKETLRDTILQYFGGHSLWTDFPFDKYLAGGKDDVDFLTDLKDVIYSMRNDSFHYATENHNNGKWNKELISAMFEHETERMTVVMKDKFYSNNLPMFYKNDDLKKLLIDLYKDNVERASQVPSFNKVFVRKNFPALVRDKDNLGIELDLKADADKGENELKFYNALYYMFKEIYYNAFLNDKNVRERFITKATKVADNYDRNKERNLKDRIKSAGSDEKKKLREQLQNYIAENDFGQRIKNIVQVNPDYTLAQICQLIMTEYNQQNNGCMQKKSAARKDINKDSYQHYKMLLLVNLRKAFLEFIKENYAFVLKPYKHDLCDKADFVPDFAKYVKPYAGLISRVAGSSELQKWYIVSRFLSPAQANHMLGFLHSYKQYVWDIYRRASETGTEINHSIAEDKIAGVDITDVDAVIDLSVKLCGTISSEISDYFKDDEVYAEYISSYLDFEYDGGNYKDSLNRFCNSDAVNDQKVALYYDGEHPKLNRNIILSKLYGERRFLEKITDRVSRSDIVEYYKLKKETSQYQTKGIFDSEDEQKNIKKFQEMKNIVEFRDLMDYSEIADELQGQLINWIYLRERDLMNFQLGYHYACLNNDSNKQATYVTLDYQGKKNRKINGAILYQICAMYINGLPLYYVDKDSSEWTVSDGKESTGAKIGEFYRYAKSFENTSDCYASGLEIFENISEHDNITELRNYIEHFRYYSSFDRSFLGIYSEVFDRFFTYDLKYRKNVPTILYNILLQHFVNVRFEFVSGKKMIGIDKKDRKIAKEKECARITIREKNGVYSEQFTYKLKNGTVYVDARDKRYLQSIIRLLFYPEKVNMDEMIEVKEKKKPSDNNTGKGYSKRDRQQDRKEYDKYKEKKKKEGNFLSGMGGNINWDEINAQLKN

SEQ ID NO: 36 - protein, 1385 aa, Clostridium aminophilum
MKFSKVDHTRSAVGIQKATDSVHGMLYTDPKKQEVNDLDKRFDQLNVKAKRLYNVFNQSKAEEDDDEKRFGKVVKKLNRELKDLLFHREVSRYNSIGNAKYNYYGIKSNPEEIVSNLGMVESLKGERDPQKVISKLLLYYLRKGLKPGTDGLRMILEASCGLRKLSGDEKELKVFLQTLDEDFEKKTFKKNLIRSIENQNMAVQPSNEGDPIIGITQGRFNSQKNEEKSAIERMMSMYADLNEDHREDVLRKLRRLNVLYFNVDTEKTEEPTLPGEVDTNPVFEVWHDHEKGKENDRQFATFAKILTEDRETRKKEKLAVKEALNDLKSAIRDHNIMAYRCSIKVTEQDKDGLFFEDQRINRFWIHHIESAVERILASINPEKLYKLRIGYLGEKVWKDLLNYLSIKYIAVGKAVFHFAMEDLGKTGQDIELGKLSNSVSGGLTSFDYEQIRADETLQRQLSVEVAFAANNLFRAVVGQTGKKIEQSKSEENEEDFLLWKAEKIAESIKKEGEGNTLKSILQFFGGASSWDLNHFCAAYGNESSALGYETKFADDLRKAIYSLRNETFHFTTLNKGSFDWNAKLIGDMFSHEAATGIAVERTRFYSNNLPMFYRESDLKRIMDHLYNTYHPRASQVPSFNSVFVRKNFRLFLSNTLNTNTSFDTEVYQKWESGVYYLFKEIYYNSFLPSGDAHHLFFEGLRRIRKEADNLPIVGKEAKKRNAVQDFGRRCDELKNLSLSAICQMIMTEYNEQNNGNRKVKSTREDKRKPDIFQHYKMLLLRTLQEAFAIYIRREEFKFIFDLPKTLYVMKPVEEFLPNWKSGMFDSLVERVKQSPDLQRWYVLCKFLNGRLLNQLSGVIRSYIQFAGDIQRRAKANHNRLYMDNTQRVEYYSNVLEVVDFCIKGTSRFSNVFSDYFRDEDAYADYLDNYLQFKDEKIAEVSSFAALKTFCNEEEVKAGIYMDGENPVMQRNIVMAKLFGPDEVLKNVVPKVTREEIEEYYQLEKQIAPYRQNGYCKSEEDQKKLLRFQRIKNRVEFQTITEFSEIINELLGQLISWSFLRERDLLYFQLGFHYLCLHNDTEKPAEYKEISREDGTVIRNAILHQVAAMYVGGLPVYTLADKKLAAFEKGEADCKLSISKDTAGAGKKIKDFFRYSKYVLIKDRMLTDQNQKYTIYLAGLELFENTDEHDNITDVRKYVDHFKYYATSDENAMSILDLYSEIHDRFFTYDMKYQKNVANMLENILLRHFVLIRPEFFTGSKKVGEGKKITCKARAQIEIAENGMRSEDFTYKLSDGKKNISTCMIAARDQKYLNTVARLLYYPHEAKKSIVDTREKKNNKKTNRGDGTFNKQKGTARKEKDNGPREFNDTGFSNTPFAGFDPFRNS

SEQ ID NO: 37 - protein, 1175 aa, Carnobacterium gallinarum
MRITKVKIKLDNKLYQVTMQKEEKYGTLKLNEESRKSTAEILRLKKASFNKSFHSKTINSQKENKNATIKKNGDYISQIFEKLVGVDTNKNIRKPKMSLTDLKDLPKKDLALFIKRKFKNDDIVEIKNLDLISLFYNALQKVPGEHFTDESWADFCQEMMPYREYKNKFIERKIILLANSIEQNKGFSINPETFSKRKRVLHQWAIEVQERGDFSILDEKLSKLAEIYNFKKMCKRVQDELNDLEKSMKKGKNPEKEKEAYKKQKNFKIKTIWKDYPYKTHIGLIEKIKENEELNQFNIEIGKYFEHYFPIKKERCTEDEPYYLNSETIATTVNYQLKNALISYLMQIGKYKQFGLENQVLDSKKLQEIGIYEGFQTKFMDACVFATSSLKNIIEPMRSGDILGKREFKEAIATSSFVNYHHFFPYFPFELKGMKDRESELIPFGEQTEAKQMQNIWALRGSVQQIRNEIFHSFDKNQKFNLPQLDKSNFEFDASENSTGKSQSYIETDYKFLFEAEKNQLEQFFIERIKSSGALEYYPLKSLEKLFAKKEMKFSLGSQVVAFAPSYKKLVKKGHSYQTATEGTANYLGLSYYNRYELKEESFQAQYYLLKLIYQYVFLPNFSQGNSPAFRETVKAILRINKDEARKKMKKNKKFLRKYAFEQVREMEFKETPDQYMSYLQSEMREEKVRKAEKNDKGFEKNITMNFEKLLMQIFVKGFDVFLTTFAGKELLLSSEEKVIKETEISLSKKINEREKTLKASIQVEHQLVATNSAISYWLFCKLLDSRHLNELRNEMIKFKQSRIKFNHTQHAELIQNLLPIVELTILSNDYDEKNDSQNVDVSAYFEDKSLYETAPYVQTDDRTRVSFRPILKLEKYHTKSLIEALLKDNPQFRVAATDIQEWMHKREEIGELVEKRKNLHTEWAEGQQTLGAEKREEYRDYCKKIDRFNWKANKVTLTYLSQLHYLITDLLGRMVGFSALFERDLVYFSRSFSELGGETYHISDYKNLSGVLRLNAEVKPIKIKNIKVIDNEENPYKGNEPEVKPFLDRLHAYLENVIGIKAVHGKIRNQTAHLSVLQLELSMIESMNNLRDLMAYDRKLKNAVTKSMIKILDKHGMILKLKIDENHKNFEIESLIPKEIIHLKDKAIKTNQVSEEYCQLVLALLTTNPGNQLN

SEQ ID NO: 38 - protein, 1164 aa, Carnobacterium gallinarum
MRMTKVKINGSPVSMNRSKLNGHLVWNGTTNTVNILTKKEQSFAASFLNKTLVKADQVKGYKVLAENIFIIFEQLEKSNSEKPSVYLNNIRRLKEAGLKRFFKSKYHEEIKYTSEKNQSVPTKLNLIPLFFNAVDRIQEDKFDEKNWSYFCKEMSPYLDYKKSYLNRKKEILANSIQQNRGFSMPTAEEPNLLSKRKQLFQQWAMKFQESPLIQQNNFAVEQFNKEFANKINELAAVYNVDELCTAITEKLMNFDKDKSNKTRNFEIKKLWKQHPHNKDKALIKLFNQEGNEALNQFNIELGKYFEHYFPKTGKKESAESYYLNPQTIIKTVGYQLRNAFVQYLLQVGKLHQYNKGVLDSQTLQEIGMYEGFQTKFMDACVFASSSLRNIIQATTNEDILTREKFKKELEKNVELKHDLFFKTEIVEERDENPAKKIAMTPNELDLWAIRGAVQRVRNQIFHQQINKRHEPNQLKVGSFENGDLGNVSYQKTIYQKLFDAEIKDIEIYFAEKIKSSGALEQYSMKDLEKLFSNKELTLSLGGQVVAFAPSYKKLYKQGYFYQNEKTIELEQFTDYDFSNDVFKANYYLIKLIYHYVFLPQFSQANNKLFKDTVHYVIQQNKELNTTEKDKKNNKKIRKYAFEQVKLMKNESPEKYMQYLQREMQEERTIKEAKKTNEEKPNYNFEKLLIQIFIKGFDTFLRNFDLNLNPAEELVGTVKEKAEGLRKRKERIAKILNVDEQIKTGDEEIAFWIFAKLLDARHLSELRNEMIKFKQSSVKKGLIKNGDLIEQMQPILELCILSNDSESMEKESFDKIEVFLEKVELAKNEPYMQEDKLTPVKFRFMKQLEKYQTRNFIENLVIENPEFKVSEKIVLNWHEEKEKIADLVDKRTKLHEEWASKAREIEEYNEKIKKNKSKKLDKPAEFAKFAEYKIICEAIENFNRLDHKVRLTYLKNLHYLMIDLMGRMVGFSVLFERDFVYMGRSYSALKKQSIYLNDYDTFANIRDWEVNENKHLFGTSSSDLTFQETAEFKNLKKPMENQLKALLGVTNHSFEIRNNIAHLHVLRNDGKGEGVSLLSCMNDLRKLMSYDRKLKNAVTKAIIKILDKHGMILKLTNNDHTKPFEIESLKPKKIIHLEKSNHSFPMDQVSQEYCDLVKKMLVFTN

SEQ ID NO: 39 - protein, 1154 aa, Paludibacter propionicigenes
MRVSKVKVKDGGKDKMVLVHRKTTGAQLVYSGQPVSNETSNILPEKKRQSFDLSTLNKTIIKFDTAKKQKLNVDQYKIVEKIFKYPKQELPKQIKAEEILPFLNHKFQEPVKYWKNGKEESFNLTLLIVEAVQAQDKRKLQPYYDWKTWYIQTKSDLLKKSIENNRIDLTENLSKRKKALLAWETEFTASGSIDLTHYHKVYMTDVLCKMLQDVKPLTDDKGKINTNAYHRGLKKALQNHQPAIFGTREVPNEANRADNQLSIYHLEVVKYLEHYFPIKTSKRRNTADDIAHYLKAQTLKTTIEKQLVNAIRANIIQQGKTNHHELKADTTSNDLIRIKTNEAFVLNLTGTCAFAANNIRNMVDNEQTNDILGKGDFIKSLLKDNTNSQLYSFFFGEGLSTNKAEKETQLWGIRGAVQQIRNNVNHYKKDALKTVFNISNFENPTITDPKQQTNYADTIYKARFINELEKIPEAFAQQLKTGGAVSYYTIENLKSLLTTFQFSLCRSTIPFAPGFKKVFNGGINYQNAKQDESFYELMLEQYLRKENFAEESYNARYFMLKLIYNNLFLPGFTTDRKAFADSVGFVQMQNKKQAEKVNPRKKEAYAFEAVRPMTAADSIADYMAYVQSELMQEQNKKEEKVAEETRINFEKFVLQVFIKGFDSFLRAKEFDFVQMPQPQLTATASNQQKADKLNQLEASITADCKLTPQYAKADDATHIAFYVFCKLLDAAHLSNLRNELIKFRESVNEFKFHHLLEIIEICLLSADVVPTDYRDLYSSEADCLARLRPFIEQGADITNWSDLFVQSDKHSPVIHANIELSVKYGTTKLLEQIINKDTQFKTTEANFTAWNTAQKSIEQLIKQREDHHEQWVKAKNADDKEKQERKREKSNFAQKFIEKHGDDYLDICDYINTYNWLDNKMHFVHLNRLHGLTIELLGRMAGFVALFDRDFQFFDEQQIADEFKLHGFVNLHSIDKKLNEVPTKKIKEIYDIRNKIIQINGNKINESVRANLIQFISSKRNYYNNAFLHVSNDEIKEKQMYDIRNHIAHFNYLTKDAADFSLIDLINELRELLHYDRKLKNAVSKAFIDLFDKHGMILKLKLNADHKLKVESLEPKKIYHLGSSAKDKPEYQYCTNQVMMAYCNMCRSLLEMKK

SEQ ID NO: 40 - protein, 970 aa, Listeria weihenstephanensis
MLALLHQEVPSQKLHNLKSLNTESLTKLFKPKFQNMISYPPSKGAEHVQFCLTDIAVPAIRDLDEIKPDWGIFFEKLKPYTDWAESYIHYKQTTIQKSIEQNKIQSPDSPRKLVLQKYVTAFLNGEPLGLDLVAKKYKLADLAESFKVVDLNEDKSANYKIKACLQQHQRNILDELKEDPELNQYGIEVKKYIQRYFPIKRAPNRSKHARADFLKKELIESTVEQQFKNAVYHYVLEQGKMEAYELTDPKTKDLQDIRSGEAFSFKFINACAFASNNLKMILNPECEKDILGKGDFKKNLPNSTTQSDVVKKMIPFFSDEIQNVNFDEAIWAIRGSIQQIRNEVYHCKKHSWKSILKIKGFEFEPNNMKYTDSDMQKLMDKDIAKIPDFIEEKLKSSGIIRFYSHDKLQSIWEMKQGFSLLTTNAPFVPSFKRVYAKGHDYQTSKNRYYDLGLTTFDILEYGEEDFRARYFLTKLVYYQQFMPWFTADNNAFRDAANFVLRLNKNRQQDAKAFINIREVEEGEMPRDYMGYVQGQIAIHEDSTEDTPNHFEKFISQVFIKGFDSHMRSADLKFIKNPRNQGLEQSEIEEMSFDIKVEPSFLKNKDDYIAFWTFCKMLDARHLSELRNEMIKYDGHLTGEQEIIGLALLGVDSRENDWKQFFSSEREYEKIMKGYVGEELYQREPYRQSDGKTPILFRGVEQARKYGTETVIQRLFDASPEFKVSKCNITEWERQKETIEETIERRKELHNEWEKNPKKPQNNAFFKEYKECCDAIDAYNWHKNKTTLVYVNELHHLLIEILGRYVGYVAIADRDFQCMANQYFKHSGITERVEYWGDNRLKSIKKLDTFLKKEGLFVSEKNARNHIAHLNYLSLKSECTLLYLSERLREIFKYDRKLKNAVSKSLIDILDRHGMSVVFANLKENKHRLVIKSLEPKKLRHLGEKKIDNGYIETNQVSEEYCGIVKRLLEI

SEQ ID NO: 41 - protein, 1051 aa, Listeriacea bacterium
MKITKMRVDGRTIVMERTSKEGQLGYEGIDGNKTTEIIFDKKKESFYKSILNKTVRKPDEKEKNRRKQAINKAINKEITELMLAVLHQEVPSQKLHNLKSLNTESLTKLFKPKFQNMISYPPSKGAEHVQFCLTDIAVPAIRDLDEIKPDWGIFFEKLKPYTDWAESYIHYKQTTIQKSIEQNKIQSPDSPRKLVLQKYVTAFLNGEPLGLDLVAKKYKLADLAESFKLVDLNEDKSANYKIKACLQQHQRNILDELKEDPELNQYGIEVKKYIQRYFPIKRAPNRSKHARADFLKKELIESTVEQQFKNAVYHYVLEQGKMEAYELTDPKTKDLQDIRSGEAFSFKFINACAFASNNLKMILNPECEKDILGKGNFKKNLPNSTTRSDVVKKMIPFFSDELQNVNFDEAIWAIRGSIQQIRNEVYHCKKHSWKSILKIKGFEFEPNNMKYADSDMQKLMDKDIAKIPEFIEEKLKSSGVVRFYRHDELQSIWEMKQGFSLLTTNAPFVPSFKRVYAKGHDYQTSKNRYYNLDLTTFDILEYGEEDFRARYFLTKLVYYQQFMPWFTADNNAFRDAANFVLRLNKNRQQDAKAFINIREVEEGEMPRDYMGYVQGQIAIHEDSIEDTPNHFEKFISQVFIKGFDRHMRSANLKFIKNPRNQGLEQSEIEEMSFDIKVEPSFLKNKDDYIAFWIFCKMLDARHLSELRNEMIKYDGHLTGEQEIIGLALLGVDSRENDWKQFFSSEREYEKIMKGYVVEELYQREPYRQSDGKTPILFRGVEQARKYGTETVIQRLFDANPEFKVSKCNLAEWERQKETIEETIKRRKELHNEWAKNPKKPQNNAFFKEYKECCDAIDAYNWHKNKTTLAYVNELHHLLIEILGRYVGYVAIADRDFQCMANQYFKHSGITERVEYWGDNRLKSIKKLDTFLKKEGLFVSEKNARNHIAHLNYLSLKSECTLLYLSERLREIFKYDRKLKNAVSKSLIDILDRHGMSVVFANLKENKHRLVIKSLEPKKLRHLGGKKIDGGYIETNQVSEEYCGIVKRLLEM

SEQ ID NO: 42 - protein, 1152 aa, Leptotrichia wadei
MKVTKVDGISHKKYIEEGKLVKSTSEENRTSERLSELLSIRLDIYIKNPDNASEEENRIRRENLKKFFSNKVLHLKDSVLYLKNRKEKNAVQDKNYSEEDISEYDLKNKNSFSVLKKILLNEDVNSEELEIFRKDVEAKLNKINSLKYSFEENKANYQKINENNVEKVGGKSKRNIIYDYYRESAKRNDYINNVQEAFDKLYKKEDIEKLFFLIENSKKHEKYKIREYYHKIIGRKNDKENFAKIIYEEIQNVNNIKELIEKIPDMSELKKSQVFYKYYLDKEELNDKNIKYAFCHFVEIEMSQLLKNYVYKRLSNISNDKIKRIFEYQNLKKLIENKLLNKLDTYVRNCGKYNYYLQVGEIATSDFIARNRQNEAFLRNIIGVSSVAYFSLRNILETENENDITGRMRGKTVKNNKGEEKYVSGEVDKIYNENKQNEVKENLKMFYSYDFNMDNKNEIEDFFANIDEAISSIRHGIVHFNLELEGKDIFAFKNIAPSEISKKMFQNEINEKKLKLKIFKQLNSANVFNYYEKDVIIKYLKNTKFNFVNKNIPFVPSFTKLYNKIEDLRNTLKFFWSVPKDKEEKDAQIYLLKNIYYGEFLNKFVKNSKVFFKITNEVIKINKQRNQKTGHYKYQKFENIEKTVPVEYLAIIQSREMINNQDKEEKNTYIDFIQQIFLKGFIDYLNKNNLKYIESNNNNDNNDIFSKIKIKKDNKEKYDKILKNYEKHNRNKEIPHEINEFVREIKLGKILKYTENLNMFYLILKLLNHKELTNLKGSLEKYQSANKEETFSDELELINLLNLDNNRVTEDFELEANEIGKFLDFNENKIKDRKELKKFDTNKIYFDGENIIKHRAFYNIKKYGMLNLLEKIADKAKYKISLKELKEYSNKKNEIEKNYTMQQNLHRKYARPKKDEKFNDEDYKEYEKAIGNIQKYTHLKNKVEFNELNLLQGLLLKILHRLVGYTSIWERDLRFRLKGEFPENHYIEEIFNFDNSKNVKYKSGQIVEKYINFYKELYKDNVEKRSIYSDKKVKKLKQEKKDLYIRNYIAHFNYIPHAEISLLEVLENLRKLLSYDRKLKNAIMKSIVDILKEYGFVATFKIGADKKIEIQTLESEKIVHLKNLKKKKLMTDRNSEELCELVKVMFEYKALE

SEQ ID NO: 43 - protein, 1285 aa, Rhodobacter capsulatus
MQIGKVQGRTISEFGDPAGGLKRKISTDGKNRKELPAHLSSDPKALIGQWISGIDKIYRKPDSRKSDGKAIHSPTPSKMQFDARDDLGEAFWKLVSEAGLAQDSDYDQFKRRLHPYGDKFQPADSGAKLKFEADPPEPQAFHGRWYGAMSKRGNDAKELAAALYEHLHVDEKRIDGQPKRNPKTDKFAPGLVVARALGIESSVLPRGMARLARNWGEEEIQTYFVVDVAASVKEVAKAAVSAAQAFDPPRQVSGRSLSPKVGFALAEHLERVTGSKRCSFDPAAGPSVLALHDEVKKTYKRLCARGKNAARAFPADKTELLALMRHTHENRVRNQMVRMGRVSEYRGQQAGDLAQSHYWTSAGQTEIKESEIFVRLWVGAFALAGRSMKAWIDPMGKIVNTEKNDRDLTAAVNIRQVISNKEMVAEAMARRGIYFGETPELDRLGAEGNEGFVFALLRYLRGCRNQTFHLGARAGFLKEIRKELEKTRWGKAKEAEHVVLTDKTVAAIRAIIDNDAKALGARLLADLSGAFVAHYASKEHFSTLYSEIVKAVKDAPEVSSGLPRLKLLLKRADGVRGYVHGLRDTRKHAFATKLPPPPAPRELDDPATKARYIALLRLYDGPFRAYASGITGTALAGPAARAKEAATALAQSVNVTKAYSDVMEGRTSRLRPPNDGETLREYLSALTGETATEFRVQIGYESDSENARKQAEFIENYRRDMLAFMFEDYIRAKGFDWILKIEPGATAMTRAPVLPEPIDTRGQYEHWQAALYLVMHFVPASDVSNLLHQLRKWEALQGKYELVQDGDATDQADARREALDLVKRFRDVLVLFLKTGEARFEGRAAPFDLKPFRALFANPATFDRLFMATPTTARPAEDDPEGDGASEPELRVARTLRGLRQIARYNHMAVLSDLFAKHKVRDEEVARLAEIEDETQEKSQIVAAQELRTDLHDKVMKCHPKTISPEERQSYAAAIKTIEEHRFLVGRVYLGDHLRLHRLMMDVIGRLIDYAGAYERDTGTFLINASKQLGAGADWAVTIAGAANTDARTQTRKDLAHFNVLDRADGTPDLTALVNRAREMMAYDRKRKNAVPRSILDMLARLGLTLKWQMKDHLLQDATITQAAIKHLDKVRLTVGGPAAVTEARFSQDYLQMVAAVFNGSVQNPKPRRRDDGDAWHKPPKPATAQSQPDQKPPNKAPSAGSRLPPPQVGEVYEGVVVKVIDTGSLGFLAVEGVAGNIGLHISRLRRIREDAIIVGRRYRFRVEIYVPPKSNTSKLNAADLVRID

SEQ ID NO: 44 - protein, 1285 aa, Rhodobacter capsulatus
MQIGKVQGRTISEFGDPAGGLKRKISTDGKNRKELPAHLSSDPKALIGQWISGIDKIYRKPDSRKSDGKAIHSPTPSKMQFDARDDLGEAFWKLVSEAGLAQDSDYDQFKRRLHPYGDKFQPADSGAKLKFEADPPEPQAFHGRWYGAMSKRGNDAKELAAALYEHLHVDEKRIDGQPKRNPKTDKFAPGLVVARALGIESSVLPRGMARLARNWGEEEIQTYFVVDVAASVKEVAKAAVSAAQAFDPPRQVSGRSLSPKVGFALAEHLERVTGSKRCSFDPAAGPSVLALHDEVKKTYKRLCARGKNAARAFPADKTELLALMRHTHENRVRNQMVRMGRVSEYRGQQAGDLAQSHYWTSAGQTEIKESEIFVRLWVGAFALAGRSMKAWIDPMGKIVNTEKNDRDLTAAVNIRQVISNKEMVAEAMARRGIYFGETPELDRLGAEGNEGFVFALLRYLRGCRNQTFHLGARAGFLKEIRKELEKTRWGKAKEAEHVVLTDKTVAAIRAIIDNDAKALGARLLADLSGAFVAHYASKEHFSTLYSEIVKAVKDAPEVSSGLPRLKLLLKRADGVRGYVHGLRDTRKHAFATKLPPPPAPRELDDPATKARYIALLRLYDGPFRAYASGITGTALAGPAARAKEAATALAQSVNVTKAYSDVMEGRSSRLRPPNDGETLREYLSALTGETATEFRVQIGYESDSENARKQAEFIENYRRDMLAFMFEDYIRAKGFDWILKIEPGATAMTRAPVLPEPIDTRGQYEHWQAALYLVMHFVPASDVSNLLHQLRKWEALQGKYELVQDGDATDQADARREALDLVKRFRDVLVLFLKTGEARFEGRAAPFDLKPFRALFANPATFDRLFMATPTTARPAEDDPEGDGASEPELRVARTLRGLRQIARYNHMAVLSDLFAKHKVRDEEVARLAEIEDETQEKSQIVAAQELRTDLHDKVMKCHPKTISPEERQSYAAAIKTIEEHRFLVGRVYLGDHLRLHRLMMDVIGRLIDYAGAYERDTGTFLINASKQLGAGADWAVTIAGAANTDARTQTRKDLAHFNVLDRADGTPDLTALVNRAREMMAYDRKRKNAVPRSILDMLARLGLTLKWQMKDHLLQDATITQAAIKHLDKVRLTVGGPAAVTEARFSQDYLQMVAAVFNGSVQNPKPRRRDDGDAWHKPPKPATAQSQPDQKPPNKAPSAGSRLPPPQVGEVYEGVVVKVIDTGSLGFLAVEGVAGNIGLHISRLRRIREDAIIVGRRYRFRVEIYVPPKSNTSKLNAADLVRID

SEQ ID NO: 45 - protein, 1285 aa, Rhodobacter capsulatus; identical to SEQ ID NO: 44

SEQ ID NO: 46 - protein, 1389 aa, Rhodobacter capsulatus
MGNLFGHKRWYEVRDKKDFKIKRKVKVKRNYDGNKYILNINENNNKEKIDNNKFIRKYINYKKNDNILKEFTRKFHAGNILFKLKGKEGIIRIENNDDFLETEEVVLYIEAYGKSEKLKALGITKKKIIDEAIRQGITKDDKKIEIKRQENEEEIEIDIRDEYTNKTLNDCSIILRIIENDELETKKSIYEIFKNINMSLYKIIEKIIENETEKVFENRYYEEHLREKLLKDDKIDVILTNFMEIREKIKSNLEILGFVKFYLNVGGDKKKSKNKKMLVEKILNINVDLTVEDIADFVIKELEFWNITKRIEKVKKVNNEFLEKRRNRTYIKSYVLLDKHEKFKIERENKKDKIVKFFVENIKNNSIKEKIEKILAEFKIDELIKKLEKELKKGNCDTEIFGIFKKHYKVNFDSKKFSKKSDEEKELYKIIYRYLKGRIEKILVNEQKVRLKKMEKIEIEKILNESILSEKILKRVKQYTLEHIMYLGKLRHNDIDMTTVNTDDFSRLHAKEELDLELITFFASTNMELNKIFSRENINNDENIDFFGGDREKNYVLDKKILNSKIKIIRDLDFIDNKNNITNNFIRKFTKIGTNERNRILHAISKERDLQGTQDDYNKVINIIQNLKISDEEVSKALNLDVVFKDKKNIITKINDIKISEENNNDIKYLPSFSKVLPEILNLYRNNPKNEPFDTIETEKIVLNALIYVNKELYKKLILEDDLEENESKNIFLQELKKTLGNIDEIDENIIENYYKNAQISASKGNNKAIKKYQKKVIECYIGYLRKNYEELFDFSDFKMNIQEIKKQIKDINDNKTYERITVKTSDKTIVINDDFEYIISIFALLNSNAVINKIRNRFFATSVWLNTSEYQNIIDILDEIMQLNTLRNECITENWNLNLEEFIQKMKEIEKDFDDFKIQTKKEIFNNYYEDIKNNILTEFKDDINGCDVLEKKLEKIVIFDDETKFEIDKKSNILQDEQRKLSNINKKDLKKKVDQYIKDKDQEIKSKILCRIIFNSDFLKKYKKEIDNLIEDMESENENKFQEIYYPKERKNELYIYKKNLFLNIGNPNFDKIYGLISNDIKMADAKFLFNIDGKNIRKNKISEIDAILKNLNDKLNGYSKEYKEKYIKKLKENDDFFAKNIQNKNYKSFEKDYNRVSEYKKIRDLVEFNYLNKIESYLIDINWKLAIQMARFERDMHYIVNGLRELGIIKLSGYNTGISRAYPKRNGSDGFYTTTAYYKFFDEESYKKFEKICYGFGIDLSENSEINKPENESIRNYISHFYIVRNPFADYSIAEQIDRVSNLLSYSTRYNNSTYASVFEVFKKDVNLDYDELKKKFKLIGNNDILERLMKPKKVSVLELESYNSDYIKNLIIELLTKIENTNDTL

SEQ ID NO: 47 - protein, 1197 aa, L. wadei
MKVTKVDGISHKKYIEEGKLVKSTSEENRTSERLSELLSIRLDIYIKNPDNASEEENRIRRENLKKFFSNKVLHLKDSVLYLKNRKEKNAVQDKNYSEEDISEYDLKNKNSFSVLKKILLNEDVNSEELEIFRKDVEAKLNKINSLKYSFEENKANYQKINENNVEKVGGKSKRNIIYDYYRESAKRNDYINNVQEAFDKLYKKEDIEKLFFLIENSKKHEKYKIREYYHKIIGRKNDKENFAKIIYEEIQNVNNIKELIEKIPDMSELKKSQVFYKYYLDKEELNDKNIKYAFCHFVEIEMSQLLKNYVYKRLSNISNDKIKRIFEYQNLKKLIENKLLNKLDTYVRNCGKYNYYLQVGEIATSDFIARNRQNEAFLRNIIGVSSVAYFSLRNILETENENDITGRMRGKTVKNNKGEEKYVSGEVDKIYNENKQNEVKENLKMFYSYDFNMDNKNEIEDFFANIDEAISSIRHGIVHFNLELEGKDIFAFKNIAPSEISKKMFQNEINEKKLKLKIFKQLNSANVFNYYEKDVIIKYLKNTKFNFVNKNIPFVPSFTKLYNKIEDLRNTLKFFWSVPKDKEEKDAQIYLLKNIYYGEFLNKFVKNSKVFFKITNEVIKINKQRNQKTGHYKYQKFENIEKTVPVEYLAIIQSREMINNQDKEEKNTYIDFIQQIFLKGFIDYLNKNNLKYIESNNNNDNNDIFSKIKIKKDNKEKYDKILKNYEKHNRNKEIPHEINEFVREIKLGKILKYTENLNMFYLILKLLNHKELTNLKGSLEKYQSANKEETFSDELELINLLNLDNNRVTEDFELEANEIGKFLDFNENKIKDRKELKKFDTNKIYFDGENIIKHRAFYNIKKYGMLNLLEKIADKAKYKISLKELKEYSNKKNEIEKNYTMQQNLHRKYARPKKDEKFNDEDYKEYEKAIGNIQKYTHLKNKVEFNELNLLQGLLLKILHRLVGYTSIWERDLRFRLKGEFPENHYIEEIFNFDNSKNVKYKSGQIVEKYINFYKELYKDNVEKRSIYSDKKVKKLKQEKKDLYIRNYIAHFNYIPHAEISLLEVLENLRKLLSYDRKLKNAIMKSIVDILKEYGFVATFKIGADKKIEIQTLESEKIVHLKNLKKKKLMTDRNSEELCELVKVMFEYKALEKRPAATKKAGQAKKKKGSYPYDVPDYAYPYDVPDYAYPYDVPDYA

SEQ ID NO: 48 - protein, 1120 aa, Listeria seeligeri
MWISIKTLIHHLGVLFFCDYMYNRREKKIIEVKTMRITKVEVDRKKVLISRDKNGGKLVYENEMQDNTEQIMHHKKSSFYKSVVNKTICRPEQKQMKKLVHGLLQENSQEKIKVSDVTKLNISNFLNHRFKKSLYYFPENSPDKSEEYRIEINLSQLLEDSLKKQQGTFICWESFSKDMELYINWAENYISSKTKLIKKSIRNNRIQSTESRSGQLMDRYMKDILNKNKPFDIQSVSEKYQLEKLTSALKATFKEAKKNDKEINYKLKSTLQNHERQIIEELKENSELNQFNIEIRKHLETYFPIKKTNRKVGDIRNLEIGEIQKIVNHRLKNKIVQRILQEGKLASYEIESTVNSNSLQKIKIEEAFALKFINACLFASNNLRNMVYPVCKKDILMIGEFKNSFKEIKHKKFIRQWSQFFSQEITVDDIELASWGLRGAIAPIRNEIIHLKKHSWKKFFNNPTFKVKKSKIINGKTKDVTSEFLYKETLFKDYFYSELDSVPELIINKMESSKILDYYSSDQLNQVFTIPNFELSLLTSAVPFAPSFKRVYLKGFDYQNQDEAQPDYNLKLNIYNEKAFNSEAFQAQYSLFKMVYYQVFLPQFTTNNDLFKSSVDFILTLNKERKGYAKAFQDIRKMNKDEKPSEYMSYIQSQLMLYQKKQEEKEKINHFEKFINQVFIKGFNSFIEKNRLTYICHPTKNTVPENDNIEIPFHTDMDDSNIAFWLMCKLLDAKQLSELRNEMIKFSCSLQSTEEISTFTKAREVIGLALLNGEKGCNDWKELFDDKEAWKKNMSLYVSEELLQSLPYTQEDGQTPVINRSIDLVKKYGTETILEKLFSSSDDYKVSAKDIAKLHEYDVTEKIAQQESLHKQWIEKPGLARDSAWTKKYQNVINDISNYQWAKTKVELTQVRHLHQLTIDLLSRLAGYMSIADRDFQFSSNYILERENSEYRVTSWILLSENKNKNKYNDYELYNLKNASIKVSSKNDPQLKVDLKQLRLTLEYLELFDNRLKEKRNNISHFNYLNGQLGNSILELFDDARDVLSYDRKLKNAVSKSLKEILSSHGMEVTFKPLYQTNHHLKIDKLQPKKIHHLGEKSTVSSNQVSNEYCQLVRTLLTMK

SEQ ID NO: 49 - protein, 1159 aa, Leptotrichia buccalis
MKVTKVGGISHKKYTSEGRLVKSESEENRTDERLSALLNMRLDMYIKNPSSTETKENQKRIGKLKKFFSNKMVYLKDNTLSLKNGKKENIDREYSETDILESDVRDKKNFAVLKKIYLNENVNSEELEVFRNDIKKKLNKINSLKYSFEKNKANYQKINENNIEKVEGKSKRNIIYDYYRESAKRDAYVSNVKEAFDKLYKEEDIAKLVLEIENLTKLEKYKIREFYHEIIGRKNDKENFAKIIYEEIQNVNNMKELIEKVPDMSELKKSQVFYKYYLDKEELNDKNIKYAFCHFVEIEMSQLLKNYVYKRLSNISNDKIKRIFEYQNLKKLIENKLLNKLDTYVRNCGKYNYYLQDGEIATSDFIARNRQNEAFLRNIIGVSSVAYFSLRNILETENENDITGRMRGKTVKNNKGEEKYVSGEVDKIYNENKKNEVKENLKMFYSYDFNMDNKNEIEDFFANIDEAISSIRHGIVHFNLELEGKDIFAFKNIAPSEISKKMFQNEINEKKLKLKIFRQLNSANVFRYLEKYKILNYLKRTRFEFVNKNIPFVPSFTKLYSRIDDLKNSLGIYWKTPKTNDDNKTKEIIDAQIYLLKNIYYGEFLNYFMSNNGNFFEISKEIIELNKNDKRNLKTGFYKLQKFEDIQEKIPKEYLANIQSLYMINAGNQDEEEKDTYIDFIQKIFLKGFMTYLANNGRLSLIYIGSDEETNTSLAEKKQEFDKFLKKYEQNNNIKIPYEINEFLREIKLGNILKYTERLNMFYLILKLLNHKELTNLKGSLEKYQSANKEEAFSDQLELINLLNLDNNRVTEDFELEADEIGKFLDFNGNKVKDNKELKKFDTNKIYFDGENIIKHRAFYNIKKYGMLNLLEKIADKAGYKISIEELKKYSNKKNEIEKNHKMQENLHRKYARPRKDEKFTDEDYESYKQAIENIEEYTHLKNKVEFNELNLLQGLLLRILHRLVGYTSIWERDLRFRLKGEFPENQYIEEIFNFENKKNVKYKGGQIVEKYIKFYKELHQNDEVKINKYSSANIKVLKQEKKDLYIRNYIAHFNYIPHAEISLLEVLENLRKLLSYDRKLKNAVMKSVVDILKEYGFVATFKIGADKKIGIQTLESEKIVHLKNLKKKKLMTDRNSEELCKLVKIMFEYKMEEKKSEN

SEQ ID NO: 50 - protein, 1285 aa, Herbinix hemicellulosilytica
MKLTRRRISGNSVDQKITAAFYRDMSQGLLYYDSEDNDCTDKVIESMDFERSWRGRILKNGEDDKNPFYMFVKGLVGSNDKIVCEPIDVDSDPDNLDILINKNLTGFGRNLKAPDSNDTLENLIRKIQAGIPEEEVLPELKKIKEMIQKDIVNRKEQLLKSIKNNRIPFSLEGSKLVPSTKKMKWLFKLIDVPNKTFNEKMLEKYWEIYDYDKLKANITNRLDKTDKKARSISRAVSEELREYHKNLRTNYNRFVSGDRPAAGLDNGGSAKYNPDKEEFLLFLKEVEQYFKKYFPVKSKHSNKSKDKSLVDKYKNYCSYKVVKKEVNRSIINQLVAGLIQQGKLLYYFYYNDTWQEDFLNSYGLSYIQVEEAFKKSVMTSLSWGINRLTSFFIDDSNTVKFDDITTKKAKEAIESNYFNKLRTCSRMQDHFKEKLAFFYPVYVKDKKDRPDDDIENLIVLVKNAIESVSYLRNRTFHFKESSLLELLKELDDKNSGQNKIDYSVAAEFIKRDIENLYDVFREQIRSLGIAEYYKADMISDCFKTCGLEFALYSPKNSLMPAFKNVYKRGANLNKAYIRDKGPKETGDQGQNSYKALEEYRELTWYIEVKNNDQSYNAYKNLLQLIYYHAFLPEVRENEALITDFINRTKEWNRKETEERLNTKNNKKHKNFDENDDITVNTYRYESIPDYQGESLDDYLKVLQRKQMARAKEVNEKEEGNNNYIQFIRDVVVWAFGAYLENKLKNYKNELQPPLSKENIGLNDTLKELFPEEKVKSPFNIKCRFSISTFIDNKGKSTDNTSAEAVKTDGKEDEKDKKNIKRKDLLCFYLFLRLLDENEICKLQHQFIKYRCSLKERRFPGNRTKLEKETELLAELEELMELVRFTMPSIPEISAKAESGYDTMIKKYFKDFIEKKVFKNPKTSNLYYHSDSKTPVTRKYMALLMRSAPLHLYKDIFKGYYLITKKECLEYIKLSNIIKDYQNSLNELHEQLERIKLKSEKQNGKDSLYLDKKDFYKVKEYVENLEQVARYKHLQHKINFESLYRIFRIHVDIAARMVGYTQDWERDMHFLFKALVYNGVLEERRFEAIFNNNDDNNDGRIVKKIQNNLNNKNRELVSMLCWNKKLNKNEFGAIIWKRNPIAHLNHFTQTEQNSKSSLESLINSLRILLAYDRKRQNAVTKTINDLLLNDYHIRIKWEGRVDEGQIYFNIKEKEDIENEPIIHLKHLHKKDCYIYKNSYMFDKQKEWICNGIKEEVYDKSILKCIGNLFKFDYEDKNKSSANPKHT

SEQ ID NO: 51 - protein, 1344 aa, Eubacterium rectale
MLRRDKEVKKLYNVFNQIQVGTKPKKWNNDEKLSPEENERRAQQKNIKMKNYKWREACSKYVESSQRIINDVIFYSYRKAKNKLRYMRKNEDILKKMQEAEKLSKFSGGKLEDFVAYTLRKSLVVSKYDTQEFDSLAAMVVFLECIGKNNISDHEREIVCKLLELIRKDFSKLDPNVKGSQGANIVRSVRNQNMIVQPQGDRFLFPQVYAKENETVTNKNVEKEGLNEFLLNYANLDDEKRAESLRKLRRILDVYFSAPNHYEKDMDITLSDNIEKEKFNVWEKHECGKKETGLFVDIPDVLMEAEAENIKLDAVVEKRERKVLNDRVRKQNIICYRYTRAVVEKYNSNEPLFFENNAINQYWIHHIENAVERILKNCKAGKLFKLRKGYLAEKVWKDAINLISIKYIALGKAVYNFALDDIWKDKKNKELGIVDERIRNGITSFDYEMIKAHENLQRELAVDIAFSVNNLARAVCDMSNLGNKESDFLLWKRNDIADKLKNKDDMASVSAVLQFFGGKSSWDINIFKDAYKGKKKYNYEVRFIDDLRKAIYCARNENFHFKTALVNDEKWNTELFGKIFERETEFCLNVEKDRFYSNNLYMFYQVSELRNMLDHLYSRSVSRAAQVPSYNSVIVRTAFPEYITNVLGYQKPSYDADTLGKWYSACYYLLKEIYYNSFLQSDRALQLFEKSVKTLSWDDKKQQRAVDNFKDHFSDIKSACTSLAQVCQIYMTEYNQQNNQIKKVRSSNDSIFDQPVYQHYKVLLKKAIANAFADYLKNNKDLFGFIGKPFKANEIREIDKEQFLPDWTSRKYEALCIEVSGSQELQKWYIVGKFLNARSLNLMVGSMRSYIQYVTDIKRRAASIGNELHVSVHDVEKVEKWVQVIEVCSLLASRTSNQFEDYFNDKDDYARYLKSYVDFSNVDMPSEYSALVDFSNEEQSDLYVDPKNPKVNRNIVHSKLFAADHILRDIVEPVSKDNIEEFYSQKAEIAYCKIKGKEITAEEQKAVLKYQKLKNRVELRDIVEYGEIINELLGQLINWSFMRERDLLYFQLGFHYDCLRNDSKKPEGYKNIKVDENSIKDAILYQIIGMYVNGVTVYAPEKDGDKLKEQCVKGGVGVKVSAFHRYSKYLGLNEKTLYNAGLEIFEVVAEHEDIINLRNGIDHFKYYLGDYRSMLSIYSEVFDRFFTYDIKYQKNVLNLLQNILLRHNVIVEPILESGFKTIGEQTKPGAKLSIRSIKSDTFQYKVKGGTLITDAKDERYLETIRKILYYAENEEDNLKKSVVVTNADKYEKNKESDDQNKQKEKKNKDNKGKKNEETKSDAEKNNNERLSYNPFANLNFKLSN

SEQ ID NO: 52 - protein, 1373 aa, Eubacteriacea bacterium
MKISKESHKRTAVAVMEDRVGGVVYVPGGSGIDLSNNLKKRSMDTKSLYNVFNQIQAGTAPSEYEWKDYLSEAENKKREAQKMIQKANYELRRECEDYAKKANLAVSRIIFSKKPKKIFSDDDIISHMKKQRLSKFKGRMEDFVLIALRKSLVVSTYNQEVFDSRKAATVFLKNIGKKNISADDERQIKQLMALIREDYDKWNPDKDSSDKKESSGTKVIRSIEHQNMVIQPEKNKLSLSKISNVGKKTKTKQKEKAGLDAFLKEYAQIDENSRMEYLKKLRRLLDTYFAAPSSYIKGAAVSLPENINFSSELNVWERHEAAKKVNINFVEIPESLLNAEQNNNKINKVEQEHSLEQLRTDIRRRNITCYHFANALAADERYHTLFFENMAMNQFWIHHMENAVERILKKCNVGTLFKLRIGYLSEKVWKDMLNLLSIKYIALGKAVYHFALDDIWKADIWKDASDKNSGKINDLTLKGISSFDYEMVKAQEDLQREMAVGVAFSTNNLARVTCKMDDLSDAESDFLLWNKEAIRRHVKYTEKGEILSAILQFFGGRSLWDESLFEKAYSDSNYELKFLDDLKRAIYAARNETFHFKTAAIDGGSWNTRLFGSLFEKEAGLCLNVEKNKFYSNNLVLFYKQEDLRVFLDKLYGKECSRAAQIPSYNTILPRKSFSDFMKQLLGLKEPVYGSAILDQWYSACYYLFKEVYYNLFLQDSSAKALFEKAVKALKGADKKQEKAVESFRKRYWEISKNASLAEICQSYITEYNQQNNKERKVRSANDGMFNEPIYQHYKMLLKEALKMAFASYIKNDKELKFVYKPTEKLFEVSQDNFLPNWNSEKYNTLISEVKNSPDLQKWYIVGKFMNARMLNLLLGSMRSYLQYVSDIQKRAAGLGENQLHLSAENVGQVKKWIQVLEVCLLLSVRISDKFTDYFKDEEEYASYLKEYVDFEDSAMPSDYSALLAFSNEGKIDLYVDASNPKVNRNIIQAKLYAPDMVLKKVVKKISQDECKEFNEKKEQIMQFKNKGDEVSWEEQQKILEYQKLKNRVELRDLSEYGELINELLGQLINWSYLRERDLLYFQLGFHYSCLMNESKKPDAYKTIRRGTVSIENAVLYQIIAMYINGFPVYAPEKGELKPQCKTGSAGQKIRAFCQWASMVEKKKYELYNAGLELFEVVKEHDNIIDLRNKIDHFKYYQGNDSILALYGEIFDRFFTYDMKYRNNVLNHLQNILLRHNVIIKPIISKDKKEVGRGKMKDRAAFLLEEVSSDRFTYKVKEGERKIDAKNRLYLETVRDILYFPNRAVNDKGEDVIICSKKAQDLNEKKADRDKNHDKSKDTNQKKEGKNQEEKSENKEPYSDRMTWKPFAGIKLE

SEQ ID NO: 53 - protein, 1276 aa, Blautia sp.
MKISKVDHVKSGIDQKLSSQRGMLYKQPQKKYEGKQLEEHVRNLSRKAKALYQVFPVSGNSKMEKELQIINSFIKNILLRLDSGKTSEEIVGYINTYSVASQISGDHIQELVDQHLKESLRKYTCVGDKRIYVPDIIVALLKSKFNSETLQYDNSELKILIDFIREDYLKEKQIKQIVHSIENNSTPLRIAEINGQKRLIPANVDNPKKSYIFEFLKEYAQSDPKGQESLLQHMRYLILLYLYGPDKITDDYCEEIEAWNFGSIVMDNEQLFSEEASMLIQDRIYVNQQIEEGRQSKDTAKVKKNKSKYRMLGDKIEHSINESVVKHYQEACKAVEEKDIPWIKYISDHVMSVYSSKNRVDLDKLSLPYLAKNTWNTWISFIAMKYVDMGKGVYHFAMSDVDKVGKQDNLIIGQIDPKFSDGISSFDYERIKAEDDLHRSMSGYIAFAVNNFARAICSDEFRKKNRKEDVLTVGLDEIPLYDNVKRKLLQYFGGASNWDDSIIDIIDDKDLVACIKENLYVARNVNFHFAGSEKVQKKQDDILEEIVRKETRDIGKHYRKVFYSNNVAVFYCDEDIIKLMNHLYQREKPYQAQIPSYNKVISKTYLPDLIFMLLKGKNRTKISDPSIMNMFRGTFYFLLKEIYYNDFLQASNLKEMFCEGLKNNVKNKKSEKPYQNFMRRFEELENMGMDFGEICQQIMTDYEQQNKQKKKTATAVMSEKDKKIRTLDNDTQKYKHFRTLLYIGLREAFIIYLKDEKNKEWYEFLREPVKREQPEEKEFVNKWKLNQYSDCSELILKDSLAAAWYVVAHFINQAQLNHLIGDIKNYIQFISDIDRRAKSTGNPVSESTEIQIERYRKILRVLEFAKFFCGQITNVLTDYYQDENDFSTHVGHYVKFEKKNMEPAHALQAFSNSLYACGKEKKKAGFYYDGMNPIVNRNITLASMYGNKKLLENAMNPVTEQDIRKYYSLMAELDSVLKNGAVCKSEDEQKNLRHFQNLKNRIELVDVLTLSELVNDLVAQLIGWVYIRERDMMYLQLGLHYIKLYFTDSVAEDSYLRTLDLEEGSIADGAVLYQIASLYSFNLPMYVKPNKSSVYCKKHVNSVATKFDIFEKEYCNGDETVIENGLRLFENINLHKDMVKFRDYLAHFKYFAKLDESILELYSKAYDFFFSYNIKLKKSVSYVLTNVLLSYFINAKLSFSTYKSSGNKTVQHRTTKISVVAQTDYFTYKLRSIVKNKNGVESIENDDRRCEVVNIAARDKEFVDEVCNVINYNSDK

SEQ ID NO: 54 - protein, 1385 aa, Leptotrichia sp.
MGNLFGHKRWYEVRDKKDFKIKRKVKVKRNYDGNKYILNINENNNKEKIDNNKFIGEFVNYKKNNNVLKEFKRKFHAGNILFKLKGKEEIIRIENNDDFLETEEVVLYIEVYGKSEKLKALEITKKKIIDEAIRQGITKDDKKIEIKRQENEEEIEIDIRDEYTNKTLNDCSIILRIIENDELETKKSIYEIFKNINMSLYKIIEKIIENETEKVFENRYYEEHLREKLLKDNKIDVILTNFMEIREKIKSNLEIMGFVKFYLNVSGDKKKSENKKMFVEKILNTNVDLTVEDIVDFIVKELKFWNITKRIEKVKKFNNEFLENRRNRTYIKSYVLLDKHEKFKIERENKKDKIVKFFVENIKNNSIKEKIEKILAEFKINELIKKLEKELKKGNCDTEIFGIFKKHYKVNFDSKKFSNKSDEEKELYKIIYRYLKGRIEKILVNEQKVRLKKMEKIEIEKILNESILSEKILKRVKQYTLEHIMYLGKLRHNDIVKMTVNTDDFSRLHAKEELDLELITFFASTNMELNKIFNGKEKVTDFFGFNLNGQKITLKEKVPSFKLNILKKLNFINNENNIDEKLSHFYSFQKEGYLLRNKILHNSYGNIQETKNLKGEYENVEKLIKELKVSDEEISKSLSLDVIFEGKVDIINKINSLKIGEYKDKKYLPSFSKIVLEITRKFREINKDKLFDIESEKIILNAVKYVNKILYEKITSNEENEFLKTLPDKLVKKSNNKKENKNLLSIEEYYKNAQVSSSKGDKKAIKKYQNKVTNAYLEYLENTFTEIIDFSKFNLNYDEIKTKIEERKDNKSKIIIDSISTNINITNDIEYIISIFALLNSNTYINKIRNRFFATSVWLEKQNGTKEYDYENIISILDEVLLINLLRENNITDILDLKNAIIDAKIVENDETYIKNYIFESNEEKLKKRLFCEELVDKEDIRKIFEDENFKFKSFIKKNEIGNFKINFGILSNLECNSEVEAKKIIGKNSKKLESFIQNIIDEYKSNIRTLFSSEFLEKYKEEIDNLVEDTESENKNKFEKIYYPKEHKNELYIYKKNLFLNIGNPNFDKIYGLISKDIKNVDTKILFDDDIKKNKISEIDAILKNLNDKLNGYSNDYKAKYVNKLKENDDFFAKNIQNENYSSFGEFEKDYNKVSEYKKIRDLVEFNYLNKIESYLIDINWKLAIQMARFERDMHYIVNGLRELGIIKLSGYNTGISRAYPKRNGSDGFYTTTAYYKFFDEESYKKFEKICYGFGIDLSENSEINKPENESIRNYISHFYIVRNPFADYSIAEQIDRVSNLLSYSTRYNNSTYASVFEVFKKDVNLDYDELKKKFRLIGNNDILERLMKPKKVSVLELESYNSDYIKNLIIELLTKIENTNDTL

SEQ ID NO: 55 - protein, 1334 aa, Lachnospiraceae
MKISKVDHTRMAVAKGNQHRRDEISGILYKDPTKTGSIDFDERFKKLNCSAKILYHVFNGIAEGSNKYKNIVDKVNNNLDRVLFTGKSYDRKSIIDIDTVLRNVEKINAFDRISTEEREQIIDDLLEIQLRKGLRKGKAGLREVLLIGAGVIVRTDKKQEIADFLEILDEDFNKTNQAKNIKLSIENQGLVVSPVSRGEERIFDVSGAQKGKSSKKAQEKEALSAFLLDYADLDKNVRFEYLRKIRRLINLYFYVKNDDVMSLTEIPAEVNLEKDFDIWRDHEQRKEENGDFVGCPDILLADRDVKKSNSKQVKIAERQLRESIREKNIKRYRFSIKTIEKDDGTYFFANKQISVFWIHRIENAVERILGSINDKKLYRLRLGYLGEKVWKDILNFLSIKYIAVGKAVFNFAMDDLQEKDRDIEPGKISENAVNGLTSFDYEQIKADEMLQREVAVNVAFAANNLARVTVDIPQNGEKEDILLWNKSDIKKYKKNSKKGILKSILQFFGGASTWNMKMFEIAYHDQPGDYEENYLYDIIQIIYSLRNKSFHFKTYDHGDKNWNRELIGKMIEHDAERVISVEREKFHSNNLPMFYKDADLKKILDLLYSDYAGRASQVPAFNTVLVRKNFPEFLRKDMGYKVHFNNPEVENQWHSAVYYLYKEIYYNLFLRDKEVKNLFYTSLKNIRSEVSDKKQKLASDDFASRCEEIEDRSLPEICQIIMTEYNAQNFGNRKVKSQRVIEKNKDIFRHYKMLLIKTLAGAFSLYLKQERFAFIGKATPIPYETTDVKNFLPEWKSGMYASFVEEIKNNLDLQEWYIVGRFLNGRMLNQLAGSLRSYIQYAEDIERRAAENRNKLFSKPDEKIEACKKAVRVLDLCIKISTRISAEFTDYFDSEDDYADYLEKYLKYQDDAIKELSGSSYAALDHFCNKDDLKFDIYVNAGQKPILQRNIVMAKLFGPDNILSEVMEKVTESAIREYYDYLKKVSGYRVRGKCSTEKEQEDLLKFQRLKNAVEFRDVTEYAEVINELLGQLISWSYLRERDLLYFQLGFHYMCLKNKSFKPAEYVDIRRNNGTIIHNAILYQIVSMYINGLDFYSCDKEGKTLKPIETGKGVGSKIGQFIKYSQYLYNDPSYKLEIYNAGLEVFENIDEHDNITDLRKYVDHFKYYAYGNKMSLLDLYSEFFDRFFTYDMKYQKNVVNVLENILLRHFVIFYPKFGSGKKDVGIRDCKKERAQIEISEQSLTSEDFMFKLDDKAGEEAKKFPARDERYLQTIAKLLYYPNEIEDMNRFMKKGETINKKVQFNRKKKITRKQKNNSSNEVLSSTMGYLFKNIKL

SEQ ID NO: 56 - protein, 500 aa, Chloroflexus aggregans
MTDQVRREEVAAGELADTPLAAAQTPAADAAVAATPAPAEAVAPTPEQAVDQPATTGESEAPVTTAQAAAHEAEPAEATGASFTPVSEQQPQKPRRLKDLQPGMELEGKVTSIALYGIFVDVGVGRDGLVHISEMSDRRIDTPSELVQIGDTVKVWVKSVDLDARRISLTMLNPSRGEKPRRSRQSQPAQPQPRRQEVDREKLASLKVGEIVEGVITGFAPFGAFADIGVGKDGLIHISELSEGRVEKPEDAVKVGERYQFKVLEIDGEGTRISLSLRRAQRTQRMQQLEPGQIIEGTVSGIATFGAFVDIGVGRDGLVHISALAPHRVAKVEDVVKVGDKVKVKVLGVDPQSKRISLTMRLEEEQPATTAGDEAAEPAEEVTPTRRGNLERFAAAAQTARERSERGERSERGERRERRERRPAQSSPDTYIVGEDDDESFEGNATIEDLLTKFGGSSSRRDRDRRRRHEDDDDEEMERPSNRRQREAIRRTLQQIGYDE

SEQ ID NO: 57 - protein, 249 aa, Demequina aurantiaca
MDLTWHALLILFIVALLAGFLDTLAGGGGLLTVPALLLTGIPPLQALGTNKLQSSFGTGMATYQVIRKKRVHWRDVRWPMVWAFLGSAAGAVAVQFIDTDALLIIIPVVLALVAAYFLFVPKSHLPPPEPRMSDPAYEATLVPIIGAYDGAFGPGTGSLYALSGVALRAKTLVQSTAIAKTLNFATNFAALLVFAFAGHMLWTVGAVMIAGQLIGAYAGSHMLFRVNPLVLRVLIVVMSLGMLIRVLLD

SEQ ID NO: 58 - protein, 1235 aa, Thalassospira sp.
MRIIKPYGRSHVEGVATQEPRRKLRLNSSPDISRDIPGFAQSHDALIIAQWISAIDKIATKPKPDKKPTQAQINLRTTLGDAAWQHVMAENLLPAATDPAIREKLHLIWQSKIAPWGTARPQAEKDGKPTPKGGWYERFCGVLSPEAITQNVARQIAKDIYDHLHVAAKRKGREPAKQGESSNKPGKFKPDRKRGLIEERAESIAKNALRPGSHAPCPWGPDDQATYEQAGDVAGQIYAAARDCLEEKKRRSGNRNTSSVQYLPRDLAAKILYAQYGRVFGPDTTIKAALDEQPSLFALHKAIKDCYHRLINDARKRDILRILPRNMAALFRLVRAQYDNRDINALIRLGKVIHYHASEQGKSEHHGIRDYWPSQQDIQNSRFWGSDGQADIKRHEAFSRIWRHIIALASRTLHDWADPHSQKFSGENDDILLLAKDAIEDDVFKAGHYERKCDVLFGAQASLFCGAEDFEKAILKQAITGTGNLRNATFHFKGKVRFEKELQELTKDVPVEVQSAIAALWQKDAEGRTRQIAETLQAVLAGHFLTEEQNRHIFAALTAAMAQPGDVPLPRLRRVLARHDSICQRGRILPLSPCPDRAKLEESPALTCQYTVLKMLYDGPFRAWLAQQNSTILNHYIDSTIARTDKAARDMNGRKLAQAEKDLITSRAADLPRLSVDEKMGDFLARLTAATATEMRVQRGYQSDGENAQKQAAFIGQFECDVIGRAFADFLNQSGFDFVLKLKADTPQPDAAQCDVTALIAPDDISVSPPQAWQQVLYFILHLVPVDDASHLLHQIRKWQVLEGKEKPAQIAHDVQSVLMLYLDMHDAKFTGGAALHGIEKFAEFFAHAADFRAVFPPQSLQDQDRSIPRRGLREIVRFGHLPLLQHMSGTVQITHDNVVAWQAARTAGATGMSPIARRQKQREELHALAVERTARFRNADLQNYMHALVDVIKHRQLSAQVTLSDQVRLHRLMMGVLGRLVDYAGLWERDLYFVVLALLYHHGATPDDVFKGQGKKNLADGQVVAALKPKNRKAAAPVGVFDDLDHYGIYQDDRQSIRNGLSHFNMLRGGKAPDLSHWVNQTRSLVAHDRKLKNAVAKSVIEMLAREGFDLDWGIQTDRGQHILSHGKIRTRQAQHFQKSRLHIVKKSAKPDKNDTVKIRENLHGDAMVERVVQLFAAQVQKRYDITVEKRLDHLFLKPQDQKGKNGIHTHNGWSKTEKKRRPSRENRKGNHEN

SEQ ID NO: 59 - protein, 1312 aa, Pseudobutyrivibrio sp.
MKFSKESHRKTAVGVTESNGIIGLLYKDPLNEKEKIEDVVNQRANSTKRLFNLFGTEATSKDISRASKDLAKVVNKAIGNLKGNKKFNKKEQITKGLNTKIIVEELKNVLKDEKKLIVNKDIIDEACSRLLKTSFRTAKTKQAVKMILTAVLIENTNLSKEDEAFVHEYFVKKLVNEYNKTSVKKQIPVALSNQNMVIQPNSVNGTLEISETKKSKETKTTEKDAFRAFLRDYATLDENRRHKMRLCLRNLVNLYFYGETSVSKDDFDEWRDHEDKKQNDELFVKKIVSIKTDRKGNVKEVLDVDATIDAIRTNNIACYRRALAYANENPDVFFSDTMLNKFWIHHVENEVERIYGHINNNTGDYKYQLGYLSEKVWKGIINYLSIKYIAEGKAVYNYAMNALAKDNNSNAFGKLDEKFVNGITSFEYERIKAEETLQRECAVNIAFAANHLANATVDLNEKDSDFLLLKHEDNKDTLGAVARPNILRNILQFFGGKSRWNDFDFSGIDEIQLLDDLRKMIYSLRNSSFHFKTENIDNDSWNTKLIGDMFAYDFNMAGNVQKDKMYSNNVPMFYSTSDIEKMLDRLYAEVHERASQVPSFNSVFVRKNFPDYLKNDLKITSAFGVDDALKWQSAVYYVCKEIYYNDFLQNPETFTMLKDYVQCLPIDIDKSMDQKLKSERNAHKNFKEAFATYCKECDSLSAICQMIMTEYNNQNKGNRKVISARTKDGDKLIYKHYKMILFEALKNVFTIYLEKNINTYGFLKKPKLINNVPAIEEFLPNYNGRQYETLVNRITEETELQKWYIVGRLLNPKQVNQLIGNFRSYVQYVNDVARRAKQTGNNLSNDNIAWDVKNIIQIFDVCTKLNGVTSNILEDYFDDGDDYARYLKNFVDYTNKNNDHSATLLGDFCAKEIDGIKIGIYHDGTNPIVNRNIIQCKLYGATGIISDLTKDGSILSVDYEIIKKYMQMQKEIKVYQQKGICKTKEEQQNLKKYQELKNIVELRNIIDYSEILDELQGQLINWGYLRERDLMYFQLGFHYLCLHNESKKPVGYNNAGDISGAVLYQIVAMYTNGLSLIDANGKSKKNAKASAGAKVGSFCSYSKEIRGVDKDTKEDDDPIYLAGVELFENINEHQQCINLRNYIEHFHYYAKHDRSMLDLYSEVFDRFFTYDMKYTKNVPNMMYNILLQHLVVPAFEFGSSEKRLDDNDEQTKPRAMFTLREKNGLSSEQFTYRLGDGNSTVKLSARGDDYLRAVASLLYYPDRAPEGLIRDAEAEDKFAKINHSNPKSDNRNNRGNFKNPKVQWYNNKTKRK

SEQ ID NO: 60 - protein, 1343 aa, Butyrivibrio sp.
MKISKVDHRKTAVKITDNKGAEGFIYQDPTRDSSTMEQIISNRARSSKVLFNIFGDTKKSKDLNKYTESLIIYVNKAIKSLKGDKRNNKYEEITESLKTERVLNALIQAGNEFTCSENNIEDALNKYLKKSFRVGNTKSALKKLLMAAYCGYKLSIEEKEEIQNYFVDKLVKEYNKDTVLKYTAKSLKHQNMVVQPDTDNHVFLPSRIAGATQNKMSEKEALTEFLKAYAVLDEEKRHNLRIILRKLVNLYFYESPDFIYPENNEWKEHDDRKNKTETFVSPVKVNEEKNGKTFVKIDVPATKDLIRLKNIECYRRSVAETAGNPITYFTDHNISKFWIHHIENEVEKIFALLKSNWKDYQFSVGYISEKVWKEIINYLSIKYIAIGKAVYNYALEDIKKNDGTLNFGVIDPSFYDGINSFEYEKIKAEETFQREVAVYVSFAVNHLSSATVKLSEAQSDMLVLNKNDIEKIAYGNTKRNILQFFGGQSKWKEFDFDRYINPVNYTDIDFLFDIKKMVYSLRNESFHFTTTDTESDWNKNLISAMFEYECRRISTVQKNKFFSNNLPLFYGENSLERVLHKLYDDYVDRMSQVPSFGNVFVRKKFPDYMKEIGIKHNLSSEDNLKLQGALYFLYKEIYYNAFISSEKAMKIFVDLVNKLDTNARDDKGRITHEAMAHKNFKDAISHYMTHDCSLADICQKIMTEYNQQNTGHRKKQTTYSSEKNPEIFRHYKMILFMLLQKAMTEYISSEEIFDFIMKPNSPKTDIKEEEFLPQYKSCAYDNLIKLIADNVELQKWYITARLLSPREVNQLIGSFRSYKQFVSDIERRAKETNNSLSKSGMTVDVENITKVLDLCTKLNGRFSNELTDYFDSKDDYAVYVSKFLDFGFKIDEKFPAALLGEFCNKEENGKKIGIYHNGTEPILNSNIIKSKLYGITDVVSRAVKPVSEKLIREYLQQEVKIKPYLENGVCKNKEEQAALRKYQELKNRIEFRDIVEYSEIINELMGQLINFSYLRERDLMYFQLGFHYLCLNNYGAKPEGYYSIVNDKRTIKGAILYQIVAMYTYGLPIYHYVDGTISDRRKNKKTVLDTLNSSETVGAKIKYFIYYSDELFNDSLILYNAGLELFENINEHENIVNLRKYIDHFKYYVSQDRSLLDIYSEVFDRYFTYDRKYKKNVMNLFSNIMLKHFIITDFEFSTGEKTIGEKNTAKKECAKVRIKRGGLSSDKFTYKFKDAKPIELSAKNTEFLDGVARILYYPENVVLTDLVRNSEVEDEKRIEKYDRNHNSSPTRKDKTYKQDVKKNYNKKTSKAFDSSKLDTKSVGNNLSDNPVLKQFLSESKKKR

SEQ ID NO: 61 - protein, 1276 aa, Blautia sp.; identical to SEQ ID NO: 53

SEQ ID NO: 62 - protein, 1168 aa, Leptotrichia marseille
MKITKIDGISHKKYIKEGKLVKSTSEENKTDERLSELLTIRLDTYIKNPDNASEEENRIRRENLKEFFSNKVLYLKDGILYLKDRREKNQLQNKNYSEEDISEYDLKNKNNFLVLKKILLNEDINSEELEIFRNDFEKKLDKINSLKYSLEENKANYQKINENNIKKVEGKSKRNIFYNYYKDSAKRNDYINNIQEAFDKLYKKEDIENLFFLIENSKKHEKYKIRECYHKIIGRKNDKENFATIIYEEIQNVNNMKELIEKVPNVSELKKSQVFYKYYLNKEKLNDENIKYVFCHFVEIEMSKLLKNYVYKKPSNISNDKVKRIFEYQSLKKLIENKLLNKLDTYVRNCGKYSFYLQDGEIATSDFIVGNRQNEAFLRNIIGVSSTAYFSLRNILETENENDITGRMRGKTVKNNKGEEKYISGEIDKLYDNNKQNEVKKNLKMFYSYDFNMNSKKEIEDFFSNIDEAISSIRHGIVHFNLELEGKDIFTFKNIVPSQISKKMFHDEINEKKLKLKIFKQLNSANVFRYLEKYKILNYLNRTRFEFVNKNIPFVPSFTKLYSRIDDLKNSLGIYWKTPKTNDDNKTKEITDAQIYLLKNIYYGEFLNYFMSNNGNFFEITKEIIELNKNDKRNLKTGFYKLQKFENLQEKTPKEYLANIQSLYMINAGNQDEEEKDTYIDFIQKIFLKGFMTYLANNGRLSLIYIGSDEETNTSLAEKKQEFDKFLKKYEQNNNIEIPYEINEFVREIKLGKILKYTERLNMFYLILKLLNHKELTNLKGSLEKYQSANKEEAFSDQLELINLLNLDNNRVTEDFELEADEIGKFLDFNGNKVKDNKELKKFDTNKIYFDGENIIKHRAFYNIKKYGMLNLLEKISDEAKYKISIEELKNYSKKKNEIEENHTTQENLHRKYARPRKDEKFTDEDYKKYEKAIRNIQQYTHLKNKVEFNELNLLQSLLLRILHRLVGYTSIWERDLRFRLKGEFPENQYIEEIFNFDNSKNVKYKNGQIVEKYINFYKELYKDDTEKISIYSDKKVKELKKEKKDLYIRNYIAHFNYIPNAEISLLEMLENLRKLLSYDRKLKNAIMKSIVDILKEYGFVVTFKIEKDKKIRIESLKSEEVVHLKKLKLKDNDKKKEPIKTYRNSKELCKLVKVMFEYKMKEKKSEN

SEQ ID NO: 63 - protein, 1138 aa, Bacterioides ihuae
MRITKVKVKESSDQKDKMVLIHRKVGEGTLVLDENLADLTAPIIDKYKDKSFELSLLKQTLVSEKEMNIPKCDKCTAKERCLSCKQREKRLKEVRGAIEKTIGAVIAGRDIIPRLNIFNEDEICWLIKPKLRNEFTFKDVNKQVVKLNLPKVLVEYSKKNDPTLFLAYQQWIAAYLKNKKGHIKKSILNNRVVIDYSDESKLSKRKQALELWGEEYETNQRIALESYHTSYNIGELVTLLPNPEEYVSDKGEIRPAFHYKLKNVLQMHQSTVFGTNEILCINPIFNENRANIQLSAYNLEVVKYFEHYFPIKKKKKNLSLNQAIYYLKVETLKERLSLQLENALRMNLLQKGKIKKHEFDKNTCSNTLSQIKRDEFFVLNLVEMCAFAANNIRNIVDKEQVNEILSKKDLCNSLSKNTIDKELCTKFYGADFSQIPVAIWAMRGSVQQIRNEIVHYKAEAIDKIFALKTFEYDDMEKDYSDTPFKQYLELSIEKIDSFFIEQLSSNDVLNYYCTEDVNKLLNKCKLSLRRTSIPFAPGFKTIYELGCHLQDSSNTYRIGHYLMLIGGRVANSTVTKASKAYPAYRFMLKLIYNHLFLNKFLDNHNKRFFMKAVAFVLKDNRENARNKFQYAFKEIRMMNNDESIASYMSYIHSLSVQEQEKKGDKNDKVRYNTEKFIEKVFVKGFDDFLSWLGVEFILSPNQEERDKTVTREEYENLMIKDRVEHSINSNQESHIAFFTFCKLLDANHLSDLRNEWIKFRSSGDKEGFSYNFAIDIIELCLLTVDRVEQRRDGYKEQTELKEYLSFFIKGNESENTVWKGFYFQQDNYTPVLYSPIELIRKYGTLELLKLIIVDEDKITQGEFEEWQTLKKVVEDKVTRRNELHQEWEDMKNKSSFSQEKCSIYQKLCRDIDRYNWLDNKLHLVHLRKLHNLVIQILSRMARFIALWDRDFVLLDASRANDDYKLLSFFNFRDFINAKKTKTDDELLAEFGSKIEKKNAPFIKAEDVPLMVECIEAKRSFYQKVFFRNNLQVLADRNFIAHYNYISKTAKCSLFEMIIKLRTLMYYDRKLRNAVVKSIANVFDQNGMVLQLSLDDSHELKVDKVISKRIVHLKNNNIMTDQVPEEYYKICRRLLEMKK

SEQ ID NO: 64 - protein, 697 aa, Porphyromonadaceae bacterium
MEFRDSIFKSLLQKEIEKAPLCFAEKLISGGVFSYYPSERLKEFVGNHPFSLFRKTMPFSPGFKRVMKSGGNYQNANRDGRFYDLDIGVYLPKDGFGDEEWNARYFLMKLIYNQLFLPYFADAENHLFRECVDFVKRVNRDYNCKNNNSEEQAFIDIRSMREDESIADYLAFIQSNIIIEENKKKETNKEGQINFNKFLLQVFVKGFDSFLKDRTELNFLQLPELQGDGTRGDDLESLDKLGAVVAVDLKLDATGIDADLNENISFYTFCKLLDSNHLSRLRNEIIKYQSANSDFSHNEDFDYDRIISIIELCMLSADHVSTNDNESIFPNNDKDFSGIRPYLSTDAKVETFEDLYVHSDAKTPITNATMVLNWKYGTDKLFERLMISDQDFLVTEKDYFVWKELKKDIEEKIKLREELHSLWVNTPKGKKGAKKKNGRETTGEFSEENKKEYLEVCREIDRYVNLDNKLHFVHLKRMHSLLIELLGRFVGFTYLFERDYQYYHLEIRSRRNKDAGVVDKLEYNKIKDQNKYDKDDFFACTFLYEKANKVRNFIAHFNYLTMWNSPQEEEHNSNLSGAKNSSGRQNLKCSLTELINELREVMSYDRKLKNAVTKAVIDLFDKHGMVIKFRIVNNNNNDNKNKHHLELDDIVPKKIMHLRGIKLKRQDGKPIPIQTDSVDPLYCRMWKKLLDLKPTPF

SEQ ID NO: 65 - protein, 204 aa, Listeria riparia
MHDAWAENPKKPQSDAFLKEYKACCEAIDTYNWHKNKATLVYVNELHHLLIDILGRLVGYVAIADRDFQCMANQYLKSSGHTERVDSWINTIRKNRPDYIEKLDIFMNKAGLFVSEKNGRNYIAHLNYLSPKHKYSLLYLFEKLREMLKYDRKLKNAVTKSLIDLLDKHGMCVVFANLKNNKHRLVIASLKPKKIETFKWKKIK

SEQ ID NO: 66 - protein, 1082 aa, Insolitispirillum peregrinum
MRIIRPYGSSTVASPSPQDAQPLRSLQRQNGTFDVAEFSRRHPELVLAQWVAMLDKIIRKPAPGKNSTALPRPTAEQRRLRQQVGAALWAEMQRHTPVPPELKAVWDSKVHPYSKDNAPATAKTPSHRGRWYDRFGDPETSAATVAEGVRRHLLDSAQPFRANGGQPKGKGVIEHRALTIQNGTLLHHHQSEKAGPLPEDWSTYRADELVSTIGKDARWIKVAASLYQHYGRIFGPTTPISEAQTRPEFVLHTAVKAYYRRLFKERKLPAERLERLLPRTGEALRHAVTVQHGNRSLADAVRIGKILHYGWLQNGEPDPWPDDAALYSSRYWGSDGQTDIKHSEAVSRVWRRALTAAQRTLTSWLYPAGTDAGDILLIGQKPDSIDRNRLPLLYGDSTRHWTRSPGDVWLFLKQTLENLRNSSFHFKTLSAFTSHLDGTCESEPAEQQAAQALWQDDRQQDHQQVFLSLRALDATTYLPTGPLHRIVNAVQSTDATLPLPRFRRVVTRAANTRLKGFPVEPVNRRTMEDDPLLRCRYGVLKLLYERGFRAWLETRPSIASCLDQSLKRSTKAAQTINGKNSPQGVEILSRATKLLQAEGGGGHGIHDLFDRLYAATAREMRVQVGYHHDAEAARQQAEFIEDLKCEVVARAFCAYLKTLGIQGDTFRRQPEPLPTWPDLPDLPSSTIGTAQAALYSVLHLMPVEDVGSLLHQLRRWLVALQARGGEDGTAITATIPLLELYLNRHDAKFSGGGAGTGLRWDDWQVFFDCQATFDRVFPPGPALDSHRLPLRGLREVLRFGRVNDLAALIGQDKITAAEVDRWHTAEQTIAAQQQRREALHEQLSRKKGTDAEVDEYRALVTAIADHRHLTAHVTLSNVVRLHRLMTTVLGRLVDYGGLWERDLTFVTLYEAHRLGGLRNLLSESRVNKFLDGQTPAALSKKNNAEENGMISKVLGDKARRQIRNDFAHFNMLQQGKKTINLTDEINNARKLMAHDRKLKNAITRSVTTLLQQDGLDIVWTMDASHRLTDAKIDSRNAIHLHKTHNRANIREPLHGKSYCRWVAALFGATSTPSATKKSDKIR

SEQ ID NO: 67 - protein, 1224 aa, Bergeyella zoohelcum
MENKTSLGNNIYYNPFKPQDKSYFAGYFNAAMENTDSVFRELGKRLKGKEYTSENFFDAIFKENISLVEYERYVKLLSDYFPMARLLDKKEVPIKERKENFKKNFKGIIKAVRDLRNFYTHKEHGEVEITDEIFGVLDEMLKSTVLTVKKKKVKTDKTKEILKKSIEKQLDILCQKKLEYLRDTARKIEEKRRNQRERGEKELVAPFKYSDKRDDLIAAIYNDAFDVYIDKKKDSLKESSKAKYNTKSDPQQEEGDLKIPISKNGVVFLLSLFLTKQEIHAFKSKIAGFKATVIDEATVSEATVSHGKNSICFMATHEIFSHLAYKKLKRKVRTAEINYGEAENAEQLSVYAKETLMMQMLDELSKVPDVVYQNLSEDVQKTFIEDWNEYLKENNGDVGTMEEEQVIHPVIRKRYEDKFNYFAIRFLDEFAQFPTLRFQVHLGNYLHDSRPKENLISDRRIKEKITVFGRLSELEHKKALFIKNTETNEDREHYWEIFPNPNYDFPKENISVNDKDFPIAGSILDREKQPVAGKIGIKVKLLNQQYVSEVDKAVKAHQLKQRKASKPSIQNIIEEIVPINESNPKEAIVFGGQPTAYLSMNDIHSILYEFFDKWEKKKEKLEKKGEKELRKEIGKELEKKIVGKIQAQIQQIIDKDTNAKILKPYQDGNSTAIDKEKLIKDLKQEQNILQKLKDEQTVREKEYNDFIAYQDKNREINKVRDRNHKQYLKDNLKRKYPEAPARKEVLYYREKGKVAVWLANDIKRFMPTDFKNEWKGEQHSLLQKSLAYYEQCKEELKNLLPEKVFQHLPFKLGGYFQQKYLYQFYTCYLDKRLEYISGLVQQAENFKSENKVFKKVENECFKFLKKQNYTHKELDARVQSILGYPIFLERGFMDEKPTIIKGKTFKGNEALFADWFRYYKEYQNFQTFYDTENYPLVELEKKQADRKRKTKIYQQKKNDVFTLLMAKHIFKSVFKQDSIDQFSLEDLYQSREERLGNQERARQTGERNTNYIWNKTVDLKLCDGKITVENVKLKNVGDFIKYEYDQRVQAFLKYEENIEWQAFLIKESKEEENYPYVVEREIEQYEKVRREELLKEVHLIEEYILEKVKDKEILKKGDNQNFKYYILNGLLKQLKNEDVESYKVFNLNTEPEDVNINQLKQEATDLEQKAFVLTYIRNKFAHNQLPKKEFWDYCQEKYGKIEKEKTYAEYFAEVFKKEKEALIK

SEQ ID NO: 68 - protein, 1126 aa, Prevotella intermedia
MEDDKKTTDSIRYELKDKHFWAAFLNLARHNVYITVNHINKILEEGEINRDGYETTLKNTWNEIKDINKKDRLSKLIIKHFPFLEAATYRLNPTDTTKQKEEKQAEAQSLESLRKSFFVFIYKLRDLRNHYSHYKHSKSLERPKFEEGLLEKMYNIFNASIRLVKEDYQYNKDINPDEDFKHLDRTEEEFNYYFTKDNEGNITESGLLFFVSLFLEKKDAIWMQQKLRGFKDNRENKKKMTNEVFCRSRMLLPKLRLQSTQTQDWILLDMLNELIRCPKSLYERLREEDREKFRVPIEIADEDYDAEQEPFKNTLVRHQDRFPYFALRYFDYNEIFTNLRFQIDLGTYHFSIYKKQIGDYKESHHLTHKLYGFERIQEFTKQNRPDEWRKFVKTFNSFETSKEPYIPETTPHYHLENQKIGIRFRNDNDKIWPSLKTNSEKNEKSKYKLDKSFQAEAFLSVHELLPMMFYYLLLKTENTDNDNEIETKKKENKNDKQEKHKIEEIIENKITEIYALYDTFANGEIKSIDELEEYCKGKDIEIGHLPKQMIAILKDEHKVMATEAERKQEEMLVDVQKSLESLDNQINEEIENVERKNSSLKSGKIASWLVNDMMRFQPVQKDNEGKPLNNSKANSTEYQLLQRTLAFFGSEHERLAPYFKQTKLIESSNPHPFLKDTEWEKCNNILSFYRSYLEAKKNFLESLKPEDWEKNQYFLKLKEPKTKPKTLVQGWKNGFNLPRGIFTEPIRKWFMKHRENITVAELKRVGLVAKVIPLFFSEEYKDSVQPFYNYHFNVGNINKPDEKNFLNCEERRELLRKKKDEFKKMTDKEKEENPSYLEFKSWNKFERELRLVRNQDIVTWLLCMELFNKKKIKELNVEKIYLKNINTNTTKKEKNTEEKNGEEKNIKEKNNILNRIMPMRLPIKVYGRENFSKNKKKKIRRNTFFTVYIEEKGTKLLKQGNFKALERDRRLGGLFSFVKTPSKAESKSNTISKLRVEYELGEYQKARIEIIKDMLALEKTLIDKYNSLDTDNFNKMLTDWLELKGEPDKASFQNDVDLLIAVRNAFSHNQYPMRNRIAFANINPFSLSSANTSEEKGLGIANQLKDKTHKTIEKIIEIEKPIETKE

SEQ ID NO: 69 - protein, 1127 aa, Prevotella buccae
MQKQDKLFVDRKKNAIFAFPKYITIMENKEKPEPIYYELTDKHFWAAFLNLARHNVYTTINHINRRLEIAELKDDGYMMGIKGSWNEQAKKLDKKVRLRDLIMKHFPFLEAAAYEMTNSKSPNNKEQREKEQSEALSLNNLKNVLFIFLEKLQVLRNYYSHYKYSEESPKPIFETSLLKNMYKVFDANVRLVKRDYMHHENIDMQRDFTHLNRKKQVGRTKNIIDSPNFHYHFADKEGNMTIAGLLFFVSLFLDKKDAIWMQKKLKGFKDGRNLREQMTNEVFCRSRISLPKLKLENVQTKDWMQLDMLNELVRCPKSLYERLREKDRESFKVPFDIFSDDYNAEEEPFKNTLVRHQDRFPYFVLRYFDLNEIFEQLRFQIDLGTYHFSIYNKRIGDEDEVRHLTHHLYGFARIQDFAPQNQPEEWRKLVKDLDHFETSQEPYISKTAPHYHLENEKIGIKFCSAHNNLFPSLQTDKTCNGRSKFNLGTQFTAEAFLSVHELLPMMFYYLLLTKDYSRKESADKVEGIIRKEISNIYAIYDAFANNEINSIADLTRRLQNTNILQGHLPKQMISILKGRQKDMGKEAERKIGEMIDDTQRRLDLLCKQTNQKIRIGKRNAGLLKSGKIADWLVNDMMRFQPVQKDQNNIPINNSKANSTEYRMLQRALALFGSENFRLKAYFNQMNLVGNDNPHPFLAETQWEHQTNILSFYRNYLEARKKYLKGLKPQNWKQYQHFLILKVQKTNRNTLVTGWKNSFNLPRGIFTQPIREWFEKHNNSKRIYDQILSFDRVGFVAKAIPLYFAEEYKDNVQPFYDYPFNIGNRLKPKKRQFLDKKERVELWQKNKELFKNYPSEKKKTDLAYLDFLSWKKFERELRLIKNQDIVTWLMFKELFNMATVEGLKIGEIHLRDIDTNTANEESNNILNRIMPMKLPVKTYETDNKGNILKERPLATFYIEETETKVLKQGNFKALVKDRRLNGLFSFAETTDLNLEEHPISKLSVDLELIKYQTTRISIFEMTLGLEKKLIDKYSTLPTDSFRNMLERWLQCKANRPELKNYVNSLIAVRNAFSHNQYPMYDATLFAEVKKFTLFPSVDTKKIELNIAPQLLEIVGKAIKEIEKSENKN

SEQ ID NO: 70 - protein, 1135 aa, Porphyrmonas gingivalis
MNTVPASENKGQSRTVEDDPQYFGLYLNLARENLIEVESHVRIKFGKKKLNEESLKQSLLCDHLLSVDRWTKVYGHSRRYLPFLHYFDPDSQIEKDHDSKTGVDPDSAQRLIRELYSLLDFLRNDFSHNRLDGTTFEHLEVSPDISSFITGTYSLACGRAQSRFAVFFKPDDFVLAKNRKEQLISVADGKECLTVSGFAFFICLFLDREQASGMLSRIRGFKRTDENWARAVHETFCDLCIRHPHDRLESSNTKEALLLDMLNELNRCPRILYDMLPEEERAQFLPALDENSMNNLSENSLDEESRLLWDGSSDWAEALTKRIRHQDRFPYLMLRFIEEMDLLKGIRFRVDLGEIELDSYSKKVGRNGEYDRTITDHALAFGKLSDFQNEEEVSRMISGEASYPVRFSLFAPRYAIYDNKIGYCHTSDPVYPKSKTGEKRALSNPQSMGFISVHDLRKLLLMELLCEGSFSRMQSDFLRKANRILDETAEGKLQFSALFPEMRHRFIPPQNPKSKDRREKAETTLEKYKQEIKGRKDKLNSQLLSAFDMDQRQLPSRLLDEWMNIRPASHSVKLRTYVKQLNEDCRLRLRKFRKDGDGKARAIPLVGEMATFLSQDIVRMIISEETKKLITSAYYNEMQRSLAQYAGEENRRQFRAIVAELRLLDPSSGHPFLSATMETAHRYTEGFYKCYLEKKREWLAKIFYRPEQDENTKRRISVFFVPDGEARKLLPLLIRRRMKEQNDLQDWIRNKQAHPIDLPSHLFDSKVMELLKVKDGKKKWNEAFKDWWSTKYPDGMQPFYGLRRELNIHGKSVSYIPSDGKKFADCYTHLMEKTVRDKKRELRTAGKPVPPDLAADIKRSFHRAVNEREFMLRLVQEDDRLMLMAINKMMTDREEDILPGLKNIDSILDEENQFSLAVHAKVLEKEGEGGDNSLSLVPATIEIKSKRKDWSKYIRYRYDRRVPGLMSHFPEHKATLDEVKTLLGEYDRCRIKIFDWAFALEGAIMSDRDLKPYLHESSSREGKSGEHSTLVKMLVEKKGCLTPDESQYLILIRNKAAHNQFPCAAEMPLIYRDVSAKVGSIEGSSAKDLPEGSSLVDSLWKKYEMIIRKILPILDPENRFFGKLLNNMSQPINDL

SEQ ID NO: 71 - protein, 1115 aa, Bacteroides pyrogenes
MESIKNSQKSTGKTLQKDPPYFGLYLNMALLNVRKVENHIRKWLGDVALLPEKSGFHSLLTTDNLSSAKWTRFYYKSRKFLPFLEMFDSDKKSYENRRETAECLDTIDRQKISSLLKEVYGKLQDIRNAFSHYHIDDQSVKHTALIISSEMHRFIENAYSFALQKTRARFTGVFVETDFLQAEEKGDNKKFFAIGGNEGIKLKDNALIFLICLFLDREEAFKFLSRATGFKSTKEKGFLAVRETFCALCCRQPHERLLSVNPREALLMDMLNELNRCPDILFEMLDEKDQKSFLPLLGEEEQAHILENSLNDELCEAIDDPFEMIASLSKRVRYKNRFPYLMLRYIEEKNLLPFIRFRIDLGCLELASYPKKMGEENNYERSVTDHAMAFGRLTDFHNEDAVLQQITKGITDEVRFSLYAPRYAIYNNKIGFVRTSGSDKISFPTLKKKGGEGHCVAYTLQNTKSFGFISIYDLRKILLLSFLDKDKAKNIVSGLLEQCEKHWKDLSENLFDAIRTELQKEFPVPLIRYTLPRSKGGKLVSSKLADKQEKYESEFERRKEKLTEILSEKDFDLSQIPRRMIDEWLNVLPTSREKKLKGYVETLKLDCRERLRVFEKREKGEHPLPPRIGEMATDLAKDIIRMVIDQGVKQRITSAYYSEIQRCLAQYAGDDNRRHLDSIIRELRLKDTKNGHPFLGKVLRPGLGHTEKLYQRYFEEKKEWLEATFYPAASPKRVPRFVNPPTGKQKELPLIIRNLMKERPEWRDWKQRKNSHPIDLPSQLFENEICRLLKDKIGKEPSGKLKWNEMFKLYWDKEFPNGMQRFYRCKRRVEVFDKVVEYEYSEEGGNYKKYYEALIDEVVRQKISSSKEKSKLQVEDLTLSVRRVFKRAINEKEYQLRLLCEDDRLLFMAVRDLYDWKEAQLDLDKIDNMLGEPVSVSQVIQLEGGQPDAVIKAECKLKDVSKLMRYCYDGRVKGLMPYFANHEATQEQVEMELRHYEDHRRRVFNWVFALEKSVLKNEKLRRFYEESQGGCEHRRCIDALRKASLVSEEEYEFLVHIRNKSAHNQFPDLEIGKLPPNVTSGFCECIWSKYKAIICRIIPFIDPERRFFGKLLEQK

SEQ ID NO: 72 - protein, 953 aa, Alistipes sp.
MSNEIGAFREHQFAYAPGNEKQEEATFATYFNLALSNVEGMMFGEVESNPDKIEKSLDTLPPAILRQIASFIWLSKEDHPDKAYSTEEVKVIVTDLVRRLCFYRNYFSHCFYLDTQYFYSDELVDTTAIGEKLPYNFHHFITNRLFRYSLPEITLFRWNEGERKYEILRDGLIFFCCLFLKRGQAERFLNELRFFKRTDEEGRIKRTIFTKYCTRESHKHIGIEEQDFLIFQDIIGDLNRVPKVCDGVVDLSKENERYIKNRETSNESDENKARYRLLIREKDKFPYYLMRYIVDFGVLPCITFKQNDYSTKEGRGQFHYQDAAVAQEERCYNFVVRNGNVYYSYMPQAQNVVRISELQGTISVEELRNMVYASINGKDVNKSVEQYLYHLHLLYEKILTISGQTIKEGRVDVEDYRPLLDKLLLRPASNGEELRRELRKLLPKRVCDLLSNRFDCSEGVSAVEKRLKAILLRHEQLLLSQNPALHIDKIKSVIDYLYLFFSDDEKFRQQPTEKAHRGLKDEEFQMYHYLVGDYDSHPLALWKELEASGRLKPEMRKLTSATSLHGLYMLCLKGTVEWCRKQLMSIGKGTAKVEAIADRVGLKLYDKLKEYTPEQLEREVKLVVMHGYAAAATPKPKAQAAIPSKLTELRFYSFLGKREMSFAAFIRQDKKAQKLWLRNFYTVENIKTLQKRQAAADAACKKLYNLVGEVERVHTNDKVLVLVAQRYRERLLNVGSKCAVTLDNPERQQKLADVYEVQNAWLSIRFDDLDFTLTHVNLSNLRKAYNLIPRKHILAFKEYLDNRVKQKLCEECRNVRRKEDLCTCCSPRYSNLTSWLKENHSESSIEREAATMMLLDVERKLLSFLLDERRKAIIEYGKFIPFSALVKECRLADAGLCGIRNDVLHDNVISYADAIGKLSAYFPKEASEAVEYIRRTKEVREQRREELMANSSQ

SEQ ID NO: 73 - protein, 1322 aa, Prevotella sp.
MSKECKKQRQEKKRRLQKANFSISLTGKHVFGAYFNMARTNFVKTINYILPIAGVRGNYSENQINKMLHALFLIQAGRNEELTTEQKQWEKKLRLNPEQQTKFQKLLFKHFPVLGPMMADVADHKAYLNKKKSTVQTEDETFAMLKGVSLADCLDIICLMADTLTECRNFYTHKDPYNKPSQLADQYLHQEMIAKKLDKVVVASRRILKDREGLSVNEVEFLTGIDHLHQEVLKDEFGNAKVKDGKVMKTFVEYDDFYFKISGKRLVNGYTVTTKDDKPVNVNTMLPALSDFGLLYFCVLFLSKPYAKLFIDEVRLFEYSPFDDKENMIMSEMLSIYRIRTPRLHKIDSHDSKATLAMDIFGELRRCPMELYNLLDKNAGQPFFHDEVKHPNSHTPDVSKRLRYDDRFPTLALRYIDETELFKRIRFQLQLGSFRYKFYDKENCIDGRVRVRRIQKEINGYGRMQEVADKRMDKWGDLIQKREERSVKLEHEELYINLDQFLEDTADSTPYVTDRRPAYNIHANRIGLYWEDSQNPKQYKVFDENGMYIPELVVTEDKKAPIKMPAPRCALSVYDLPAMLFYEYLREQQDNEFPSAEQVIIEYEDDYRKFFKAVAEGKLKPFKRPKEFRDFLKKEYPKLRMADIPKKLQLFLCSHGLCYNNKPETVYERLDRLTLQHLEERELHIQNRLEHYQKDRDMIGNKDNQYGKKSFSDVRHGALARYLAQSMMEWQPTKLKDKEKGHDKLTGLNYNVLTAYLATYGHPQVPEEGFTPRTLEQVLINAHLIGGSNPHPFINKVLALGNRNIEELYLHYLEEELKHIRSRIQSLSSNPSDKALSALPFIHHDRMRYHERTSEEMMALAARYTTIQLPDGLFTPYILEILQKHYTENSDLQNALSQDVPVKLNPTCNAAYLITLFYQTVLKDNAQPFYLSDKTYTRNKDGEKAESFSFKRAYELFSVLNNNKKDTFPFEMIPLFLTSDEIQERLSAKLLDGDGNPVPEVGEKGKPATDSQGNTIWKRRIYSEVDDYAEKLTDRDMKISFKGEWEKLPRWKQDKIIKRRDETRRQMRDELLQRMPRYIRDIKDNERTLRRYKTQDMVLFLLAEKMFTNIISEQSSEFNWKQMRLSKVCNEAFLRQTLTFRVPVTVGETTIYVEQENMSLKNYGEFYRFLTDDRLMSLLNNIVETLKPNENGDLVIRHTDLMSELAAYDQYRSTIFMLIQSIENLIITNNAVLDDPDADGFWVREDLPKRNNFASLLELINQLNNVELTDDERKLLVAIRNAFSHNSYNIDFSLIKDVKHLPEVAKGILQHLQSMLGVEITK

SEQ ID NO: 74 - protein, 1322 aa, Prevotella sp.; identical to SEQ ID NO: 73

SEQ ID NO: 75 - protein, 1095 aa, Riemerella anatipestifer
MEKPLLPNVYTLKHKFFWGAFLNIARHNAFITICHINEQLGLKTPSNDDKIVDVVCETWNNILNNDHDLLKKSQLTELILKHFPFLTAMCYHPPKKEGKKKGHQKEQQKEKESEAQSQAEALNPSKLIEALEILVNQLHSLRNYYSHYKHKKPDAEKDIFKHLYKAFDASLRMVKEDYKAHFTVNLTRDFAHLNRKGKNKQDNPDFNRYRFEKDGFFTESGLLFFTNLFLDKRDAYWMLKKVSGFKASHKQREKMTTEVFCRSRILLPKLRLESRYDHNQMLLDMLSELSRCPKLLYEKLSEENKKHFQVEADGFLDEIEEEQNPFKDTLIRHQDRFPYFALRYLDLNESFKSIRFQVDLGTYHYCIYDKKIGDEQEKRHLTRTLLSFGRLQDFTEINRPQEWKALTKDLDYKETSNQPFISKTTPHYHITDNKIGFRLGTSKELYPSLEIKDGANRIAKYPYNSGFVAHAFISVHELLPLMFYQHLTGKSEDLLKETVRHIQRIYKDFEEERINTIEDLEKANQGRLPLGAFPKQMLGLLQNKQPDLSEKAKIKIEKLIAETKLLSHRLNTKLKSSPKLGKRREKLIKTGVLADWLVKDFMRFQPVAYDAQNQPIKSSKANSTEFWFIRRALALYGGEKNRLEGYFKQTNLIGNTNPHPFLNKFNWKACRNLVDFYQQYLEQREKFLEAIKNQPWEPYQYCLLLKIPKENRKNLVKGWEQGGISLPRGLFTEAIRETLSEDLMLSKPIRKEIKKHGRVGFISRAITLYFKEKYQDKHQSFYNLSYKLEAKAPLLKREEHYEYWQQNKPQSPTESQRLELHTSDRWKDYLLYKRWQHLEKKLRLYRNQDVMLWLMTLELTKNHFKELNLNYHQLKLENLAVNVQEADAKLNPLNQTLPMVLPVKVYPATAFGEVQYHKTPIRTVYIREEHTKALKMGNFKALVKDRRLNGLFSFIKEENDTQKHPISQLRLRRELEIYQSLRVDAFKETLSLEEKLLNKHTSLSSLENEFRALLEEWKKEYAASSMVTDEHIAFIASVRNAFCHNQYPFYKEALHAPIPLFTVAQPTTEEKDGLGIAEALLKVLREYCEIVKSQI

SEQ ID NO: 76 - protein, 1124 aa, Prevotella aurantiaca
MEDDKKTTGSISYELKDKHFWAAFLNLARHNVYITINHINKLLEIREIDNDEKVLDIKTLWQKGNKDLNQKARLRELMTKHFPFLETAIYTKNKEDKKEVKQEKQAEAQSLESLKDCLFLFLDKLQEARNYYSHYKYSEFSKEPEFEEGLLEKMYNIFGNNIQLVINDYQHNKDINPDEDFKHLDRKGQFKYSFADNEGNITESGLLFFVSLFLEKKDAIWMQQKLNGFKDNLENKKKMTHEVFCRSRILMPKLRLESTQTQDWILLDMLNELIRCPKSLYERLQGDDREKFKVPFDPADEDYNAEQEPFKNTLIRHQDRFPYFVLRYFDYNEIFKNLRFQIDLGTYHFSIYKKLIGGQKEDRHLTHKLYGFERIQEFAKQNRPDEWKAIVKDLDTYETSNKRYISETTPHYHLENQKIGIRFRNGNKEIWPSLKTNDENNEKSKYKLDKQYQAEAFLSVHELLPMMFYYLLLKKEKPNNDEINASIVEGFIKREIRNIFKLYDAFANGEINNIDDLEKYCADKGIPKRHLPKQMVAILYDEHKDMVKEAKRKQKEMVKDTKKLLATLEKQTQKEKEDDGRNVKLLKSGEIARWLVNDMMRFQPVQKDNEGKPLNNSKANSTEYQMLQRSLALYNNEEKPTRYFRQVNLIESNNPHPFLKWTKWEECNNILTFYYSYLTKKIEFLNKLKPEDWKKNQYFLKLKEPKTNRETLVQGWKNGFNLPRGIFTEPIREWFKRHQNNSKEYEKVEALDRVGLVTKVIPLFFKEEYFKDKEENFKEDTQKEINDCVQPFYNFPYNVGNIHKPKEKDFLHREERIELWDKKKDKFKGYKEKIKSKKLTEKDKEEFRSYLEFQSWNKFERELRLVRNQDIVTWLLCKELIDKLKIDELNIEELKKLRLNNIDTDTAKKEKNNILNRVMPMELPVTVYEIDDSHKIVKDKPLHTIYIKEAETKLLKQGNFKALVKDRRLNGLFSFVKTNSEAESKRNPISKLRVEYELGEYQEARIEIIQDMLALEEKLINKYKDLPTNKFSEMLNSWLEGKDEADKARFQNDVDFLIAVRNAFSHNQYPMHNKIEFANIKPFSLYTANNSEEKGLGIANQLKDKTKETTDKIKKIEKPIETKE

SEQ ID NO: 77 - protein, 1151 aa, Prevotella saccharolytica
MEDKPFWAAFFNLARHNVYLTVNHINKLLDLEKLYDEGKHKEIFEREDIFNISDDVMNDANSNGKKRKLDIKKIWDDLDTDLTRKYQLRELILKHFPFIQPAIIGAQTKERTTIDKDKRSTSTSNDSLKQTGEGDINDLLSLSNVKSMFFRLLQILEQLRNYYSHVKHSKSATMPNFDEDLLNWMRYIFIDSVNKVKEDYSSNSVIDPNTSFSHLIYKDEQGKIKPCRYPFTSKDGSINAFGLLFFVSLFLEKQDSIWMQKKIPGFKKASENYMKMTNEVFCRNHILLPKIRLETVYDKDWMLLDMLNEVVRCPLSLYKRLTPAAQNKFKVPEKSSDNANRQEDDNPFSRILVRHQNRFPYFVLRFFDLNEVFTTLRFQINLGCYHFAICKKQIGDKKEVHHLIRTLYGFSRLQNFTQNTRPEEWNTLVKTTEPSSGNDGKTVQGVPLPYISYTIPHYQIENEKIGIKIFDGDTAVDTDIWPSVSTEKQLNKPDKYTLTPGFKADVFLSVHELLPMMFYYQLLLCEGMLKTDAGNAVEKVLIDTRNAIFNLYDAFVQEKINTITDLENYLQDKPILIGHLPKQMIDLLKGHQRDMLKAVEQKKAMLIKDTERRLKLLDKQLKQETDVAAKNTGTLLKNGQIADWLVNDMMRFQPVKRDKEGNPINCSKANSTEYQMLQRAFAFYATDSCRLSRYFTQLHLIHSDNSHLFLSRFEYDKQPNLIAFYAAYLKAKLEFLNELQPQNWASDNYFLLLRAPKNDRQKLAEGWKNGFNLPRGLFTEKIKTWFNEHKTIVDISDCDIFKNRVGQVARLIPVFFDKKFKDHSQPFYRYDFNVGNVSKPTEANYLSKGKREELFKSYQNKFKNNIPAEKTKEYREYKNFSLWKKFERELRLIKNQDILIWLMCKNLFDEKIKPKKDILEPRIAVSYIKLDSLQTNTSTAGSLNALAKVVPMTLAIHIDSPKPKGKAGNNEKENKEFTVYIKEEGTKLLKWGNFKTLLADRRIKGLFSYIEHDDIDLKQHPLTKRRVDLELDLYQTCRIDIFQQTLGLEAQLLDKYSDLNTDNFYQMLIGWRKKEGIPRNIKEDTDFLKDVRNAFSHNQYPDSKKIAFRRIRKFNPKELILEEEEGLGIATQMYKEVEKVVNRIKRIELFD

SEQ ID NO: 78 - protein, 1159 aa, Myroides odoratimim
MKDILTTDTTEKQNRFYSHKIADKYFFGGYFNLASNNIYEVFEEVNKRNTFGKLAKRDNGNLKNYIIHVFKDELSISDFEKRVAIFASYFPILETVDKKSIKERNRTIDLTLSQRIRQFREMLISLVTAVDQLRNFYTHYHHSDIVIENKVLDFLNSSFVSTALHVKDKYLKTDKTKEFLKETIAAELDILIEAYKKKQIEKKNTRFKANKREDILNAIYNEAFWSFINDKDKDKDKETVVAKGADAYFEKNHHKSNDPDFALNISEKGIVYLLSFFLTNKEMDSLKANLTGFKGKVDRESGNSIKYMATQRIYSFHTYRGLKQKIRTSEEGVKETLLMQMIDELSKVPNVVYQHLSTTQQNSFIEDWNEYYKDYEDDVETDDLSRVIHPVIRKRYEDRFNYFAIRFLDEFFDFPTLRFQVHLGDYVHDRRTKQLGKVESDRIIKEKVTVFARLKDINSAKASYFHSLEEQDKEELDNKWTLFPNPSYDFPKEHTLQHQGEQKNAGKIGIYVKLRDTQYKEKAALEEARKSLNPKERSATKASKYDIITQIIEANDNVKSEKPLVFTGQPIAYLSMNDIHSMLFSLLTDNAELKKTPEEVEAKLIDQIGKQINEILSKDTDTKILKKYKDNDLKETDTDKITRDLARDKEEIEKLILEQKQRADDYNYTSSTKFNIDKSRKRKHLLFNAEKGKIGVWLANDIKRFMFKESKSKWKGYQHTELQKLFAYFDTSKSDLELILSNMVMVKDYPIELIDLVKKSRTLVDFLNKYLEARLEYIENVITRVKNSIGTPQFKTVRKECFTFLKKSNYTVVSLDKQVERILSMPLFIERGFMDDKPTMLEGKSYKQHKEKFADWFVHYKENSNYQNFYDTEVYEITTEDKREKAKVTKKIKQQQKNDVFTLMMVNYMLEEVLKLSSNDRLSLNELYQTKEERIVNKQVAKDTQERNKNYIWNKVVDLQLCDGLVHIDNVKLKDIGNFRKYENDSRVKEFLTYQSDIVWSAYLSNEVDSNKLYVIERQLDNYESIRSKELLKEVQEIECSVYNQVANKESLKQSGNENFKQYVLQGLLPIGMDVREMLILSTDVKFKKEEIIQLGQAGEVEQDLYSLIYIRNKFAHNQLPIKEFFDFCENNYRSISDNEYYAEYYMEIFRSIKEKYAN

SEQ ID NO: 79 - protein, 1120 aa, Prevotella intermedia
MEDDKKTTDSIRYELKDKHFWAAFLNLARHNVYITVNHINKILEEDEINRDGYENTLENSWNEIKDINKKDRLSKLIIKHFPFLEATTYRQNPTDTTKQKEEKQAEAQSLESLKKSFFVFIYKLRDLRNHYSHYKHSKSLERPKFEEDLQNKMYNIFDVSIQFVKEDYKHNTDINPKKDFKHLDRKRKGKFHYSFADNEGNITESGLLFFVSLFLEKKDAIWVQKKLEGFKCSNKSYQKMTNEVFCRSRMLLPKLRLESTQTQDWILLDMLNELIRCPKSLYERLQGVNRKKFYVSFDPADEDYDAEQEPFKNTLVRHQDRFPYFALRYFDYNEVFANLRFQIDLGTYHFSIYKKLIGGQKEDRHLTHKLYGFERIQEFDKQNRPDEWKAIVKDSDTFKKKEEKEEEKPYISETTPHYHLENKKIGIAFKNHNIWPSTQTELTNNKRKKYNLGTSIKAEAFLSVHELLPMMFYYLLLKTENTKNDNKVGGKKETKKQGKHKIEAIIESKIKDIYALYDAFANGEINSEDELKEYLKGKDIKIVHLPKQMIAILKNEHKDMAEKAEAKQEKMKLATENRLKTLDKQLKGKIQNGKRYNSAPKSGEIASWLVNDMMRFQPVQKDENGESLNNSKANSTEYQLLQRTLAFFGSEHERLAPYFKQTKLIESSNPHPFLNDTEWEKCSNILSFYRSYLKARKNFLESLKPEDWEKNQYFLMLKEPKTNRETLVQGWKNGFNLPRGFFTEPIRKWFMEHWKSIKVDDLKRVGLVAKVTPLFFSEKYKDSVQPFYNYPFNVGDVNKPKEEDFLHREERIELWDKKKDKFKGYKAKKKFKEMTDKEKEEHRSYLEFQSWNKFERELRLVRNQDIVTWLLCTELIDKLKIDELNIKELKKLRLKDINTDTAKKEKNNILNRVMPMELPVTVYKVNKGGYIIKNKPLHTIYIKEAETKLLKQGNFKALVKDRRLNGLFSFVKTPSEAESESNPISKLRVEYELGKYQNARLDIIEDMLALEKKLIDKYNSLDTDNFHNMLTGWLELKGEAKKARFQNDVKLLTAVRNAFSHNQYPMYDENLFGNIERFSLSSSNIIESKGLDIAAKLKEEVSKAAKKIQNEEDNKKEKET

SEQ ID NO: 80 - protein, 1199 aa, Capnocytophaga canimorsus
MKNIQRLGKGNEFSPFKKEDKFYFGGFLNLANNNIEDFFKEIITRFGIVITDENKKPKETFGEKILNEIFKKDISIVDYEKWVNIFADYFPFTKYLSLYLEEMQFKNRVICFRDVMKELLKTVEALRNFYTHYDHEPIKIEDRVFYFLDKVLLDVSLTVKNKYLKTDKTKEFLNQHIGEELKELCKQRKDYLVGKGKRIDKESEIINGIYNNAFKDFICKREKQDDKENHNSVEKILCNKEPQNKKQKSSATVWELCSKSSSKYTEKSFPNRENDKHCLEVPISQKGIVFLLSFFLNKGEIYALTSNIKGFKAKITKEEPVTYDKNSIRYMATHRMFSFLAYKGLKRKIRTSEINYNEDGQASSTYEKETLMLQMLDELNKVPDVVYQNLSEDVQKTFIEDWNEYLKENNGDVGTMEEEQVIHPVIRKRYEDKFNYFAIRFLDEFAQFPTLRFQVHLGNYLCDKRTKQICDTTTEREVKKKITVFGRLSELENKKAIFLNEREEIKGWEVFPNPSYDFPKENISVNYKDFPIVGSILDREKQPVSNKIGIRVKIADELQREIDKAIKEKKLRNPKNRKANQDEKQKERLVNEIVSTNSNEQGEPVVFIGQPTAYLSMNDIHSVLYEFLINKISGEALETKIVEKIETQIKQIIGKDATTKILKPYTNANSNSINREKLLRDLEQEQQILKTLLEEQQQREKDKKDKKSKRKHELYPSEKGKVAVWLANDIKRFMPKAFKEQWRGYHHSLLQKYLAYYEQSKEELKNLLPKEVFKHFPFKLKGYFQQQYLNQFYTDYLKRRLSYVNELLLNIQNFKNDKDALKATEKECFKFFRKQNYIINPINIQIQSILVYPIFLKRGFLDEKPTMIDREKFKENKDTELADWFMHYKNYKEDNYQKFYAYPLEKVEEKEKFKRNKQINKQKKNDVYTLMMVEYIIQKIFGDKFVEENPLVLKGIFQSKAERQQNNTHAATTQERNLNGILNQPKDIKIQGKITVKGVKLKDIGNFRKYEIDQRVNTFLDYEPRKEWMAYLPNDWKEKEKQGQLPPNNVIDRQISKYETVRSKILLKDVQELEKIISDEIKEEHRHDLKQGKYYNFKYYILNGLLRQLKNENVENYKVFKLNTNPEKVNITQLKQEATDLEQKAFVLTYIRNKFAHNQLPKKEFWDYCQEKYGKIEKEKTYAEYFAEVFKREKEALIK

SEQ ID NO: 81 - protein, 1175 aa, Porphyromonas gulae
MTEQSERPYNGTYYTLEDKHFWAAFLNLARHNAYITLTHIDRQLAYSKADITNDQDVLSFKALWKNFDNDLERKSRLRSLILKHFSFLEGAAYGKKLFESKSSGNKSSKNKELTKKEKEELQANALSLDNLKSILFDFLQKLKDFRNYYSHYRHSGSSELPLFDGNMLQRLYNVFDVSVQRVKIDHEHNDEVDPHYHFNHLVRKGKKDRYGHNDNPSFKHHFVDGEGMVTEAGLLFFVSLFLEKRDAIWMQKKIRGFKGGTETYQQMTNEVFCRSRISLPKLKLESLRMDDWMLLDMLNELVRCPKPLYDRLREDDRACFRVPVDILPDEDDTDGGGEDPFKNTLVRHQDRFPYFALRYFDLKKVFTSLRFHIDLGTYHFAIYKKMIGEQPEDRHLTRNLYGFGRIQDFAEEHRPEEWKRLVRDLDYFETGDKPYISQTSPHYHIEKGKIGLRFMPEGQHLWPSPEVGTTRTGRSKYAQDKRLTAEAFLSVHELMPMMFYYFLLREKYSEEVSAERVQGRIKRVIEDVYAVYDAFARDEINTRDELDACLADKGIRRGHLPRQMIAILSQEHKDMEEKIRKKLQEMMADTDHRLDMLDRQTDRKIRIGRKNAGLPKSGVIADWLVRDMMRFQPVAKDASGKPLNNSKANSTEYRMLQRALALFGGEKERLTPYFRQMNLTGGNNPHPFLHETRWESHTNILSFYRSYLRARKAFLERIGRSDRVENRPFLLLKEPKTDRQTLVAGWKGEFHLPRGIFTEAVRDCLIEMGHDEVASYKEVGFMAKAVPLYFERACEDRVQPFYDSPFNVGNSLKPKKGRFLSKEERAEEWERGKERFRDLEAWSYSAARRIEDAFAGIEYASPGNKKKIEQLLRDLSLWEAFESKLKVRADRINLAKLKKEILEAQEHPYHDFKSWQKFERELRLVKNQDIITWMMCRDLMEENKVEGLDTGTLYLKDIRPNVQEQGSLNVLNRVKPMRLPVVVYRADSRGHVHKEEAPLATVYIEERDTKLLKQGNFKSFVKDRRLNGLFSFVDTGGLAMEQYPISKLRVEYELAKYQTARVCVFELTLRLEESLLTRYPHLPDESFREMLESWSDPLLAKWPELHGKVRLLIAVRNAFSHNQYPMYDEAVFSSIRKYDPSSPDAIEERMGLNIAHRLSEEVKQAKETVERIIQA

SEQ ID NO: 82 - protein, 1090 aa, Prevotella sp.
MNIPALVENQKKYFGTYSVMAMLNAQTVLDHIQKVADIEGEQNENNENLWFHPVMSHLYNAKNGYDKQPEKTMFIIERLQSYFPFLKIMAENQREYSNGKYKQNRVEVNSNDIFEVLKRAFGVLKMYRDLTNHYKTYEEKLNDGCEFLTSTEQPLSGMINNYYTVALRNMNERYGYKTEDLAFIQDKRFKFVKDAYGKKKSQVNTGFFLSLQDYNGDTQKKLHLSGVGIALLICLFLDKQYINIFLSRLPIFSSYNAQSEERRIIIRSFGINSIKLPKDRIHSEKSNKSVAMDMLNEVKRCPDELFTTLSAEKQSRFRIISDDHNEVLMKRSSDRFVPLLLQYIDYGKLFDHIRFHVNMGKLRYLLKADKTCIDGQTRVRVIEQPLNGFGRLEEAETMRKQENGTFGNSGIRIRDFENMKRDDANPANYPYIVDTYTHYILENNKVEMFINDKEDSAPLLPVIEDDRYVVKTIPSCRMSTLEIPAMAFHMFLFGSKKTEKLIVDVHNRYKRLFQAMQKEEVTAENIASFGIAESDLPQKILDLISGNAHGKDVDAFIRLTVDDMLTDTERRIKRFKDDRKSIRSADNKMGKRGFKQISTGKLADFLAKDIVLFQPSVNDGENKITGLNYRIMQSAIAVYDSGDDYEAKQQFKLMFEKARLIGKGTTEPHPFLYKVFARSIPANAVEFYERYLIERKFYLTGLSNEIKKGNRVDVPFIRRDQNKWKTPAMKTLGRIYSEDLPVELPRQMFDNEIKSHLKSLPQMEGIDFNNANVTYLIAEYMKRVLDDDFQTFYQWNRNYRYMDMLKGEYDRKGSLQHCFTSVEEREGLWKERASRTERYRKQASNKIRSNRQMRNASSEEIETILDKRLSNSRNEYQKSEKVIRRYRVQDALLFLLAKKTLTELADFDGERFKLKEIMPDAEKGILSEIMPMSFTFEKGGKKYTITSEGMKLKNYGDFFVLASDKRIGNLLELVGSDIVSKEDIMEEFNKYDQCRPEISSIVFNLEKWAFDTYPELSARVDREEKVDFKSILKILLNNKNINKEQSDILRKIRNAFDHNNYPDKGVVEIKALPEIAMSIKKAFGEYAIMK

SEQ ID NO: 83 - protein, 1150 aa, Flavobacterium branchiophilum
MENLNKILDKENEICISKIFNTKGIAAPITEKALDNIKSKQKNDLNKEARLHYFSIGHSFKQIDTKKVFDYVLIEELKDEKPLKFITLQKDFFTKEFSIKLQKLINSIRNINNHYVHNFNDINLNKIDSNVFHFLKESFELAIIEKYYKVNKKYPLDNEIVLFLKELFIKDENTALLNYFTNLSKDEAIEYILTFTITENKIWNINNEHNILNIEKGKYLTFEAMLFLITIFLYKNEANHLLPKLYDFKNNKSKQELFTFFSKKFTSQDIDAEEGHLIKFRDMIQYLNHYPTAWNNDLKLESENKNKIMTTKLIDSIIEFELNSNYPSFATDIQFKKEAKAFLFASNKKRNQTSFSNKSYNEEIRHNPHIKQYRDEIASALTPISFNVKEDKFKIFVKKHVLEEYFPNSIGYEKFLEYNDFTEKEKEDFGLKLYSNPKTNKLIERIDNHKLVKSHGRNQDRFMDFSMRFLAENNYFGKDAFFKCYKFYDTQEQDEFLQSNENNDDVKFHKGKVTTYIKYEEHLKNYSYWDCPFVEENNSMSVKISIGSEEKILKIQRNLMIYFLENALYNENVENQGYKLVNNYYRELKKDVEESIASLDLIKSNPDFKSKYKKILPKRLLHNYAPAKQDKAPENAFETLLKKADFREEQYKKLLKKAEHEKNKEDFVKRNKGKQFKLHFIRKACQMMYFKEKYNTLKEGNAAFEKKDPVIEKRKNKEHEFGHHKNLNITREEFNDYCKWMFAFNGNDSYKKYLRDLFSEKHFFDNQEYKNLFESSVNLEAFYAKTKELFKKWIETNKPTNNENRYTLENYKNLILQKQVFINVYHFSKYLIDKNLLNSENNVIQYKSLENVEYLISDFYFQSKLSIDQYKTCGKLFNKLKSNKLEDCLLYEIAYNYIDKKNVHKIDIQKILTSKIILTINDANTPYKISVPFNKLERYTEMIAIKNQNNLKARFLIDLPLYLSKNKIKKGKDSAGYEIIIKNDLEIEDINTINNKIINDSVKFTEVLMELEKYFILKDKCILSKNYIDNSEIPSLKQFSKVWIKENENEIINYRNIACHFHLPLLETFDNLLLNVEQKFIKEELQNVSTINDLSKPQEYLILLFIKFKHNNFYLNLFNKNESKTIKNDKEVKKNRVLQKFINQVILKKK

SEQ ID NO: 84 - protein, 1159 aa, Myroides odoratimum
MKDILTTDTTEKQNRFYSHKIADKYFFGGYFNLASNNIYEVFEEVNKRNTFGKLAKRDNGNLKNYIIHVFKDELSISDFEKRVAIFASYFPILETVDKKSIKERNRTIDLTLSQRIRQFREMLISLVTAVDQLRNFYTHYHHSDIVIENKVLDFLNSSFVSTALHVKDKYLKTDKTKEFLKETIAAELDILIEAYKKKQIEKKNTRFKANKREDILNAIYNEAFWSFINDKDKDKDKETVVAKGADAYFEKNHHKSNDPDFALNISEKGIVYLLSFFLTNKEMDSLKANLTGFKGKVDRESGNSIKYMATQRIYSFHTYRGLKQKIRTSEEGVKETLLMQMIDELSKVPNVVYQHLSTTQQNSFIEDWNEYYKDYEDDVETDDLSRVTHPVIRKRYEDRFNYFAIRFLDEFFDFPTLRFQVHLGDYVHDRRTKQLGKVESDRIIKEKVTVFARLKDINSAKASYFHSLEEQDKEELDNKWTLFPNPSYDFPKEHTLQHQGEQKNAGKIGIYVKLRDTQYKEKAALEEARKSLNPKERSATKASKYDIITQIIEANDNVKSEKPLVFTGQPIAYLSMNDIHSMLFSLLTDNAELKKTPEEVEAKLIDQIGKQINEILSKDTDTKILKKYKDNDLKETDTDKITRDLARDKEEIEKLILEQKQRADDYNYTSSTKFNIDKSRKRKHLLFNAEKGKIGVWLANDIKRFMFKESKSKWKGYQHIELQKLFAYFDTSKSDLELILSNMVMVKDYPIELIDLVKKSRTLVDFLNKYLEARLEYIENVITRVKNSIGTPQFKTVRKECFTFLKKSNYTVVSLDKQVERILSMPLFIERGFMDDKPTMLEGKSYKQHKEKFADWFVHYKENSNYQNFYDTEVYEITTEDKREKAKVTKKIKQQQKNDVFTLMMVNYMLEEVLKLSSNDRLSLNELYQTKEERIVNKQVAKDTQERNKNYIWNKVVDLQLCDGLVHIDNVKLKDIGNFRKYENDSRVKEFLTYQSDIVWSAYLSNEVDSNKLYVIERQLDNYESIRSKELLKEVQEIECSVYNQVANKESLKQSGNENFKQYVLQGLLPIGMDVREMLILSTDVKFKKEEIIQLGQAGEVEQDLYSLIYIRNKFAHNQLPIKEFFDFCENNYRSISDNEYYAEYYMEIFRSIKEKYAN

SEQ ID NO: 85 - protein, 1214 aa, Flavobacterium columnare
MSSKNESYNKQKTFNHYKQEDKYFFGGFLNNADDNLRQVGKEFKTRINFNHNNNELASVFKDYFNKEKSVAKREHALNLLSNYFPVLERIQKHTNHNFEQTREIFELLLDTIKKLRDYYTHHYHKPITINPKIYDFLDDTLLDVLITIKKKKVKNDTSRELLKEKLRPELTQLKNQKREELIKKGKKLLEENLENAVFNHCLIPFLEENKTDDKQNKTVSLRKYRKSKPNEETSITLTQSGLVFLMSFFLHRKEFQVFTSGLERFKAKVNTIKEEEISLNKNNIVYMITHWSYSYYNFKGLKHRIKTDQGVSTLEQNNTTHSLTNTNTKEALLTQIVDYLSKVPNEIYETLSEKQQKEFEEDINEYMRENPENEDSTFSSIVSHKVIRKRYENKFNYFAMRFLDEYAELPTLRFMVNFGDYIKDRQKKILESIQFDSERIIKKEIHLFEKLSLVTEYKKNVYLKETSNIDLSRFPLFPNPSYVMANNNIPFYIDSRSNNLDEYLNQKKKAQSQNKKRNLTFEKYNKEQSKDAIIAMLQKEIGVKDLQQRSTIGLLSCNELPSMLYEVIVKDIKGAELENKIAQKIREQYQSIRDFTLDSPQKDNIPTTLIKTINTDSSVTFENQPIDIPRLKNALQKELTLTQEKLLNVKEHEIEVDNYNRNKNTYKFKNQPKNKVDDKKLQRKYVFYRNEIRQEANWLASDLIHFMKNKSLWKGYMHNELQSFLAFFEDKKNDCIALLETVFNLKEDCILTKGLKNLFLKHGNFIDFYKEYLKLKEDFLSTESTFLENGFIGLPPKILKKELSKRLKYIFIVFQKRQFIIKELEEKKNNLYADAINLSRGIFDEKPTMIPFKKPNPDEFASWFVASYQYNNYQSFYELTPDIVERDKKKKYKNLRAINKVKIQDYYLKLMVDTLYQDLFNQPLDKSLSDFYVSKAEREKIKADAKAYQKLNDSSLWNKVIHLSLQNNRITANPKLKDIGKYKRALQDEKIATLLTYDARTWTYALQKPEKENENDYKELHYTALNMELQEYEKVRSKELLKQVQELEKKILDKFYDFSNNASHPEDLEIEDKKGKRHPNFKLYITKALLKNESEIINLENIDIEILLKYYDYNTEELKEKIKNMDEDEKAKIINTKENYNKITNVLIKKALVLIIIRNKMAHNQYPPKFIYDLANRFVPKKEEEYFATYFNRVFETITKELWENKEKKDKTQV

SEQ ID NO: 86 - protein, 1119 aa, Porphymonas gingivalis
MTEQNEKPYNGTYYTLEDKHFWAAFLNLARHNAYITLAHIDRQLAYSKADITNDEDILFFKGQWKNLDNDLERKARLRSLILKHFSFLEGAAYGKKLFESQSSGNKSSKKKELSKKEKEELQANALSLDNLKSILFDFLQKLKDFRNYYSHYRHPESSELPLFDGNMLQRLYNVFDVSVQRVKRDHEHNDKVDPHRHFNHLVRKGKKDKYGNNDNPFFKHHFVDREGTVTEAGLLFFVSLFLEKRDAIWMQKKIRGFKGGTEAYQQMTNEVFCRSRISLPKLKLESLRTDDWMLLDMLNELVRCPKSLYDRLREEDRARFRVPVDILSDEDDTDGTEEDPFKNTLVRHQDRFPYFALRYFDLKKVFTSLRFHIDLGTYHFAIYKKNIGEQPEDRHLTRNLYGFGRIQDFAEEHRPEEWKRLVRDLDYFETGDKPYITQTTPHYHIEKGKIGLRFVPEGQHLWPSPEVGATRTGRSKYAQDKRLTAEAFLSVHELMPMMFYYFLLREKYSEEVSAEKVQGRIKRVIEDVYAVYDAFARDEINTRDELDACLADKGIRRGHLPRQMIAILSQEHKDMEEKVRKKLQEMIADTDHRLDMLDRQTDRKIRIGRKNAGLPKSGVVADWLVRDMMRFQPVAKDTSGKPLNNSKANSTEYRMLQRALALFGGEKERLTPYFRQMNLTGGNNPHPFLHETRWESHTNILSFYRSYLEARKAFLQSIGRSDRVENHRFLLLKEPKTDRQTLVAGWKGEFHLPRGIFTEAVRDCLIEMGYDEVGSYKEVGFMAKAVPLYFERASKDRVQPFYDYPFNVGNSLKPKKGRFLSKEKRAEEWESGKERFRLAKLKKEILEAKEHPYHDFKSWQKFERELRLVKNQDIITWMMCRDLMEENKVEGLDTGTLYLKDIRTDVQEQGSLNVLNRVKPMRLPVVVYRADSRGHVHKEQAPLATVYIEERDTKLLKQGNFKSFVKDRRLNGLFSFVDTGALAMEQYPISKLRVEYELAKYQTARVCAFEQTLELEESLLTRYPHLPDKNFRKMLESWSDPLLDKWPDLHGNVRLLIAVRNAFSHNQYPMYDETLFSSIRKYDPSSPDAIEERMGLNIAHRLSEEVKQAKEMVERIIQA

SEQ ID NO: 87 - protein, 1175 aa, Porphyromonas sp.
MTEQSERPYNGTYYTLEDKHFWAAFLNLARHNAYITLTHIDRQLAYSKADITNDQDVLSFKALWKNFDNDLERKSRLRSLILKHFSFLEGAAYGKKLFESKSSGNKSSKNKELTKKEKEELQANALSLDNLKSILFDFLQKLKDFRNYYSHYRHSESSELPLFDGNMLQRLYNVFDVSVQRVKRDHEHNDKVDPHRHFNHLVRKGKKDRYGHNDNPSFKHHFVDSEGMVTEAGLLFFVSLFLEKRDAIWMQKKIRGFKGGTETYQQMTNEVFCRSRISLPKLKLESLRTDDWMLLDMLNELVRCPKPLYDRLREDDRACFRVPVDILPDEDDTDGGGEDPFKNTLVRHQDRFPYFALRYFDLKKVFTSLRFHIDLGTYHFAIYKKMIGEQPEDRHLTRNLYGFGRIQDFAEEHRPEEWKRLVRDLDYFETGDKPYISQTTPHYHIEKGKIGLRFVPEGQHLWPSPEVGTTRTGRSKYAQDKRLTAEAFLSVHELMPMMFYYFLLREKYSEEVSAEKVQGRIKRVIEDVYAIYDAFARDEINTLKELDACLADKGIRRGHLPKQMIGILSQERKDMEEKVRKKLQEMIADTDHRLDMLDRQTDRKIRIGRKNAGLPKSGVIADWLVRDMMRFQPVAKDTSGKPLNNSKANSTEYRMLQRALALFGGEKERLTPYFRQMNLTGGNNPHPFLHETRWESHTNILSFYRSYLRARKAFLERIGRSDRVENCPFLLLKEPKTDRQTLVAGWKGEFHLPRGIFTEAVRDCLIEMGYDEVGSYREVGFMAKAVPLYFERACEDRVQPFYDSPFNVGNSLKPKKGRFLSKEDRAEEWERGKERFRDLEAWSHSAARRIKDAFAGIEYASPGNKKKIEQLLRDLSLWEAFESKLKVRADKINLAKLKKEILEAQEHPYHDFKSWQKFERELRLVKNQDIITWMMCRDLMEENKVEGLDTGTLYLKDIRPNVQEQGSLNVLNRVKPMRLPVVVYRADSRGHVHKEEAPLATVYIEERDTKLLKQGNFKSFVKDRRLNGLFSFVDTGGLAMEQYPISKLRVEYELAKYQTARVCVFELTLRLEESLLSRYPHLPDESFREMLESWSDPLLAKWPELHGKVRLLIAVRNAFSHNQYPMYDEAVFSSIRKYDPSSPDAIEERMGLNIAHRLSEEVKQAKETVERIIQA

SEQ ID NO: 88 - protein, 1132 aa, Prevotella intermedia
MEDDKKTKESTNMLDNKHFWAAFLNLARHNVYITVNHINKVLELKNKKDQDIIIDNDQDILAIKTHWEKVNGDLNKTERLRELMTKHFPFLETAIYTKNKEDKEEVKQEKQAKAQSFDSLKHCLFLFLEKLQEARNYYSHYKYSESTKEPMLEKELLKKMYNIFDDNIQLVIKDYQHNKDINPDEDFKHLDRTEEEFNYYFTTNKKGNITASGLLFFVSLFLEKKDAIWMQQKLRGFKDNRESKKKMTHEVFCRSRMLLPKLRLESTQTQDWILLDMLNELIRCPKSLYERLQGEYRKKFNVPFDSADEDYDAEQEPFKNTLVRHQDRFPYFALRYFDYNEIFTNLRFQIDLGTYHFSIYKKLIGGQKEDRHLTHKLYGFERIQEFAKQNRTDEWKAIVKDFDTYETSEEPYISETAPHYHLENQKIGIRFRNDNDEIWPSLKTNGENNEKRKYKLDKQYQAEAFLSVHELLPMMFYYLLLKKEEPNNDKKNASIVEGFIKREIRDIYKLYDAFANGEINNIDDLEKYCEDKGIPKRHLPKQMVAILYDEHKDMAEEAKRKQKEMVKDTKKLLATLEKQTQGEIEDGGRNIRLLKSGEIARWLVNDMMRFQPVQKDNEGNPLNNSKANSTEYQMLQRSLALYNKEEKPTRYFRQVNLINSSNPHPFLKWTKWEECNNILSFYRSYLTKKIEFLNKLKPEDWEKNQYFLKLKEPKTNRETLVQGWKNGFNLPRGIFTEPIREWFKRHQNDSEEYEKVETLDRVGLVTKVIPLFFKKEDSKDKEEYLKKDAQKEINNCVQPFYGFPYNVGNIHKPDEKDFLPSEERKKLWGDKKYKFKGYKAKVKSKKLTDKEKEEYRSYLEFQSWNKFERELRLVRNQDIVTWLLCTELIDKLKVEGLNVEELKKLRLKDIDTDTAKQEKNNILNRVMPMQLPVTVYEIDDSHNIVKDRPLHTVYIEETKTKLLKQGNFKALVKDRRLNGLFSFVDTSSETELKSNPISKSLVEYELGEYQNARIETIKDMLLLEETLIEKYKTLPTDNFSDMLNGWLEGKDEADKARFQNDVKLLVAVRNAFSHNQYPMRNRIAFANINPFSLSSADTSEEKKLDIANQLKDKTHKIIKRIIEIEKPIETKE

SEQ ID NO: 89 - protein, 1134 aa, Prevotella intermedia
MKMEDDKKTKESTNMLDNKHFWAAFLNLARHNVYITVNHINKVLELKNKKDQDIIIDNDQDILAIKTHWEKVNGDLNKTERLRELMTKHFPFLETAIYTKNKEDKEEVKQEKQAKAQSFDSLKHCLFLFLEKLQEARNYYSHYKYSESTKEPMLEKELLKKMYNIFDDNIQLVIKDYQHNKDINPDEDFKHLDRTEEEFNYYFTTNKKGNITASGLLFFVSLFLEKKDAIWMQQKLRGFKDNRESKKKMTHEVFCRSRMLLPKLRLESTQTQDWILLDMLNELIRCPKSLYERLQGEYRKKFNVPFDSADEDYDAEQEPFKNTLVRHQDRFPYFALRYFDYNEIFTNLRFQIDLGTYHFSIYKKLIGGQKEDRHLTHKLYGFERIQEFAKQNRTDEWKAIVKDFDTYETSEEPYISETAPHYHLENQKIGIRFRNDNDEIWPSLKTNGENNEKRKYKLDKQYQAEAFLSVHELLPMMFYYLLLKKEEPNNDKKNASIVEGFIKREIRDIYKLYDAFANGEINNIDDLEKYCEDKGIPKRHLPKQMVAILYDEHKDMAEEAKRKQKEMVKDTKKLLATLEKQTQGEIEDGGRNIRLLKSGEIARWLVNDMMRFQPVQKDNEGNPLNNSKANSTEYQMLQRSLALYNKEEKPTRYFRQVNLINSSNPHPFLKWTKWEECNNILSFYRSYLTKKIEFLNKLKPEDWEKNQYFLKLKEPKTNRETLVQGWKNGFNLPRGIFTEPIREWFKRHQNDSEEYEKVETLDRVGLVTKVIPLFFKKEDSKDKEEYLKKDAQKEINNCVQPFYGFPYNVGNIHKPDEKDFLPSEERKKLWGDKKYKFKGYKAKVKSKKLTDKEKEEYRSYLEFQSWNKFERELRLVRNQDIVTWLLCTELIDKLKVEGLNVEELKKLRLKDIDTDTAKQEKNNILNRVMPMQLPVTVYEIDDSHNIVKDRPLHTVYIEETKTKLLKQGNFKALVKDRRLNGLFSFVDTSSETELKSNPISKSLVEYELGEYQNARIETIKDMLLLEETLIEKYKTLPTDNFSDMLNGWLEGKDEADKARFQNDVKLLVAVRNAFSHNQYPMRNRIAFANINPFSLSSADTSEEKKLDIANQLKDKTHKIIKRIIEIEKPIETKE

SEQ ID NO: 90 - protein, 1133 aa, Prevotella intermedia
MEDDKKTTDSISYELKDKHFWAAFLNLARHNVYITVNHINKVLELKNKKDQDIIIDNDQDILAIKTHWEKVNGDLNKTERLRELMTKHFPFLETAIYSKNKEDKEEVKQEKQAKAQSFDSLKHCLFLFLEKLQETRNYYSHYKYSESTKEPMLEKELLKKMYNIFDDNIQLVIKDYQHNKDINPDEDFKHLDRTEEDFNYYFTRNKKGNITESGLLFFVSLFLEKKDAIWMQQKLRGFKDNRESKKKMTHEVFCRSRMLLPKLRLESTQTQDWILLDMLNELIRCPKSLYERLQGEDREKFKVPFDPADEDYDAEQEPFKNTLVRHQDRFPYFALRYFDYNEIFTNLRFQIDLGTFHFSIYKKLIGGQKEDRHLTHKLYGFERIQEFAKQNRPDEWKAIVKDLDTYETSNERYISETTPHYHLENQKIGIRFRNDNDEIWPSLKTNGENNEKSKYKLDKQYQAEAFLSVHELLPMMFYYLLLKKEEPNNDKKNASIVEGFIKREIRDMYKLYDAFANGEINNIDDLEKYCEDKGIPKRHLPKQMVAILYDEHKDMVKEAKRKQRKMVKDTEKLLAALEKQTQEKTEDGGRNIRLLKSGEIARWLVNDMMRFQPVQKDNEGNPLNNSKANSTEYQMLQRSLALYNKEEKPTRYFRQVNLINSSNPHPFLKWTKWEECNNILSFYRSYLTKKIEFLNKLKPEDWEKNQYFLKLKEPKTNRETLVQGWKNGFNLPRGIFTEPIREWFKRHQNDSKEYEKVEALDRVGLVTKVIPLFFKKEDSKDKEEDLKKDAQKEINNCVQPFYSFPYNVGNIHKPDEKDFLHREERIELWDKKKDKFKGYKAKVKSKKLTDKEKEEYRSYLEFQSWNKFERELRLVRNQDIVTWLLCTELIDKLKVEGLNVEELKKLRLKDIDTDTAKQEKNNILNRVMPMQLPVTVYEIDDSHNIVKDRPLHTVYIEETKTKLLKQGNFKALVKDRRLNGLFSFVDTSSEAELKSNPISKSLVEYELGEYQNARIETIKDMLLLEETLIEKYKNLPTDNFSDMLNGWLEGKDEADKARFQNDVKLLVAVRNAFSHNQYPMRNRIAFANINPFSLSSADTSEEKKLDIANQLKDKTHKIIKRIIEIEKPIETKE

SEQ ID NO: 91 - protein, 1127 aa, Prevotella buccae; identical to SEQ ID NO: 69

SEQ ID NO: 92 - protein, 1125 aa, Prevotella pallens
MKEEEKGKTPVVSTYNKDDKHFWAAFLNLARHNVYITVNHINKILGEGEINRDGYENTLEKSWNEIKDINKKDRLSKLIIKHFPFLEVTTYQRNSADTTKQKEEKQAEAQSLESLKKSFFVFIYKLRDLRNHYSHYKHSKSLERPKFEEDLQEKMYNIFDASIQLVKEDYKHNTDIKTEEDFKHLDRKGQFKYSFADNEGNITESGLLFFVSLFLEKKDAIWVQKKLEGFKCSNESYQKMTNEVFCRSRMLLPKLRLQSTQTQDWILLDMLNELIRCPKSLYERLREEDRKKFRVPIEIADEDYDAEQEPFKNALVRHQDRFPYFALRYFDYNEIFTNLRFQIDLGTYHFSIYKKQIGDYKESHHLTHKLYGFERIQEFTKQNRPDEWRKFVKTFNSFETSKEPYIPETTPHYHLENQKIGIRFRNDNDKIWPSLKTNSEKNEKSKYKLDKSFQAEAFLSVHELLPMMFYYLLLKTENTDNDNEIETKKKENKNDKQEKHKIEEIIENKITEIYALYDAFANGKINSIDKLEEYCKGKDIEIGHLPKQMIAILKSEHKDMATEAKRKQEEMLADVQKSLESLDNQINEEIENVERKNSSLKSGEIASWLVNDMMRFQPVQKDNEGNPLNNSKANSTEYQMLQRSLALYNKEEKPTRYFRQVNLIESSNPHPFLNNTEWEKCNNILSFYRSYLEAKKNFLESLKPEDWEKNQYFLMLKEPKTNCETLVQGWKNGFNLPRGIFTEPIRKWFMEHRKNITVAELKRVGLVAKVIPLFFSEEYKDSVQPFYNYLFNVGNINKPDEKNFLNCEERRELLRKKKDEFKKMTDKEKEENPSYLEFQSWNKFERELRLVRNQDIVTWLLCMELFNKKKIKELNVEKIYLKNINTNTTKKEKNTEEKNGEEKIIKEKNNILNRIMPMRLPIKVYGRENFSKNKKKKIRRNTFFTVYIEEKGTKLLKQGNFKALERDRRLGGLFSFVKTHSKAESKSNTISKSRVEYELGEYQKARIEIIKDMLALEETLIDKYNSLDTDNFHNMLTGWLKLKDEPDKASFQNDVDLLIAVRNAFSHNQYPMRNRIAFANINPFSLSSANTSEEKGLGIANQLKDKTHKTIEKIIEIEKPIETKE

SEQ ID NO: 93 - protein, 1157 aa, Myroides odoratimum
MKDILTTDTTEKQNRFYSHKIADKYFFGGYFNLASNNIYEVFEEVNKRNTFGKLAKRDNGNLKNYIIHVFKDELSISDFEKRVAIFASYFPILETVDKKSIKERNRTIDLTLSQRIRQFREMLISLVTAVDQLRNFYTHYHHSEIVIENKVLDFLNSSLVSTALHVKDKYLKTDKTKEFLKETIAAELDILIEAYKKKQIEKKNTRFKANKREDILNAIYNEAFWSFINDKDKDKETVVAKGADAYFEKNHHKSNDPDFALNISEKGIVYLLSFFLTNKEMDSLKANLTGFKGKVDRESGNSIKYMATQRIYSFHTYRGLKQKIRTSEEGVKETLLMQMIDELSKVPNVVYQHLSTTQQNSFIEDWNEYYKDYEDDVETDDLSRVIHPVIRKRYEDRFNYFAIRFLDEFFDFPTLRFQVHLGDYVHDRRTKQLGKVESDRIIKEKVTVFARLKDINSAKANYFHSLEEQDKEELDNKWTLFPNPSYDFPKEHTLQHQGEQKNAGKIGIYVKLRDTQYKEKAALEEARKSLNPKERSATKASKYDIITQIIEANDNVKSEKPLVFTGQPIAYLSMNDIHSMLFSLLTDNAELKKTPEEVEAKLIDQIGKQINEILSKDTDTKILKKYKDNDLKETDTDKITRDLARDKEEIEKLILEQKQRADDYNYTSSTKFNIDKSRKRKHLLFNAEKGKIGVWLANDIKRFMTEEFKSKWKGYQHTELQKLFAYYDTSKSDLDLILSDMVMVKDYPIELIALVKKSRTLVDFLNKYLEARLGYMENVITRVKNSIGTPQFKTVRKECFTFLKKSNYTVVSLDKQVERILSMPLFIERGFMDDKPTMLEGKSYQQHKEKFADWFVHYKENSNYQNFYDTEVYEITTEDKREKAKVTKKIKQQQKNDVFTLMMVNYMLEEVLKLSSNDRLSLNELYQTKEERIVNKQVAKDTQERNKNYIWNKVVDLQLCEGLVRIDKVKLKDIGNFRKYENDSRVKEFLTYQSDIVWSAYLSNEVDSNKLYVIERQLDNYESIRSKELLKEVQEIECSVYNQVANKESLKQSGNENFKQYVLQGLVPIGMDVREMLILSTDVKFIKEEIIQLGQAGEVEQDLYSLIYIRNKFAHNQLPIKEFFDFCENNYRSISDNEYYAEYYMEIFRSIKEKYTS

SEQ ID NO: 94 - protein, 1157 aa, Myroides odoratimum
MKDILTTDTTEKQNRFYSHKIADKYFFGGYFNLASNNIYEVFEEVNKRNTFGKLAKRDNGNLKNYIIHVFKDELSISDFEKRVAIFASYFPILETVDKKSIKERNRTIDLTLSQRIRQFREMLISLVTAVDQLRNFYTHYHHSEIVIENKVLDFLNSSLVSTALHVKDKYLKTDKTKEFLKETIAAELDILIEAYKKKQIEKKNTRFKANKREDILNAIYNEAFWSFINDKDKDKETVVAKGADAYFEKNHHKSNDPDFALNISEKGIVYLLSFFLTNKEMDSLKANLTGFKGKVDRESGNSIKYMATQRIYSFHTYRGLKQKIRTSEEGVKETLLMQMIDELSKVPNVVYQHLSTTQQNSFIEDWNEYYKDYEDDVETDDLSRVIHPVIRKRYEDRFNYFAIRFLDEFFDFPTLRFQVHLGDYVHDRRTKQLGKVESDRIIKEKVTVFARLKDINSAKASYFHSLEEQDKEELDNKWTLFPNPSYDFPKEHTLQHQGEQKNAGKIGIYVKLRDTQYKEKAALEEARKSLNPKERSATKASKYDIITQIIEANDNVKSEKPLVFTGQPIAYLSMNDIHSMLFSLLTDNAELKKTPEEVEAKLIDQIGKQINEILSKDTDTKILKKYKDNDLKETDTDKITRDLARDKEEIEKLILEQKQRADDYNYTSSTKFNIDKSRKRKHLLFNAEKGKIGVWLANDIKRFMFKESKSKWKGYQHTELQKLFAYFDTSKSDLELILSDMVMVKDYPIELIDLVRKSRTLVDFLNKYLEARLGYIENVITRVKNSIGTPQFKTVRKECFAFLKESNYTVASLDKQIERILSMPLFIERGFMDSKPTMLEGKSYQQHKEDFADWFVHYKENSNYQNFYDTEVYEIITEDKREQAKVTKKIKQQQKNDVFTLMMVNYMLEEVLKLPSNDRLSLNELYQTKEERIVNKQVAKDTQERNKNYIWNKVVDLQLCEGLVRIDKVKLKDIGNFRKYENDSRVKEFLTYQSDIVWSGYLSNEVDSNKLYVIERQLDNYESIRSKELLKEVQEIECIVYNQVANKESLKQSGNENFKQYVLQGLLPRGTDVREMLILSTDVKFKKEEIMQLGQVREVEQDLYSLIYIRNKFAHNQLPIKEFFDFCENNYRPISDNEYYAEYYMEIFRSIKEKYAS

SEQ ID NO: 95 - protein, 1224 aa, Bergeyella zoohelcum; identical to SEQ ID NO: 67

SEQ ID NO: 96 - protein, 1150 aa, Prevotella saccharolytica
MMEKENVQGSHIYYEPTDKCFWAAFYNLARHNAYLTIAHINSFVNSKKGINNDDKVLDIIDDWSKFDNDLLMGARLNKLILKHFPFLKAPLYQLAKRKTRKQQGKEQQDYEKKGDEDPEVIQEAIANAFKMANVRKTLHAFLKQLEDLRNHFSHYNYNSPAKKMEVKFDDGFCNKLYYVFDAALQMVKDDNRMNPEINMQTDFEHLVRLGRNRKIPNTFKYNFTNSDGTINNNGLLFFVSLFLEKRDAIWMQKKIKGFKGGTENYMRMTNEVFCRNRMVIPKLRLETDYDNHQLMFDMLNELVRCPLSLYKRLKQEDQDKFRVPIEFLDEDNEADNPYQENANSDENPTEETDPLKNTLVRHQHRFPYFVLRYFDLNEVFKQLRFQINLGCYHFSIYDKTIGERTEKRHLTRTLFGFDRLQNFSVKLQPEHWKNMVKHLDTEESSDKPYLSDAMPHYQIENEKIGIHFLKTDTEKKETVWPSLEVEEVSSNRNKYKSEKNLTADAFLSTHELLPMMFYYQLLSSEEKTRAAAGDKVQGVLQSYRKKIFDIYDDFANGTINSMQKLDERLAKDNLLRGNMPQQMLAILEHQEPDMEQKAKEKLDRLITETKKRIGKLEDQFKQKVRIGKRRADLPKVGSIADWLVNDMMRFQPAKRNADNTGVPDSKANSTEYRLLQEALAFYSAYKDRLEPYFRQVNLIGGTNPHPFLHRVDWKKCNHLLSFYHDYLEAKEQYLSHLSPADWQKHQHFLLLKVRKDIQNEKKDWKKSLVAGWKNGFNLPRGLFTESIKTWFSTDADKVQITDTKLFENRVGLIAKLIPLYYDKVYNDKPQPFYQYPFNINDRYKPEDTRKRFTAASSKLWNEKKMLYKNAQPDSSDKIEYPQYLDFLSWKKLERELRMLRNQDMMVWLMCKDLFAQCTVEGVEFADLKLSQLEVDVNVQDNLNVLNNVSSMILPLSVYPSDAQGNVLRNSKPLHTVYVQENNTKLLKQGNFKSLLKDRRLNGLFSFIAAEGEDLQQHPLTKNRLEYELSIYQTMRISVFEQTLQLEKAILTRNKTLCGNNFNNLLNSWSEHRTDKKTLQPDIDFLIAVRNAFSHNQYPMSTNTVMQGIEKFNIQTPKLEEKDGLGIASQLAKKTKDAASRLQNIINGGTN

SEQ ID NO: 97 - protein, 1175 aa, Porphyromonas gingivalis
MTEQNEKPYNGTYYTLEDKHFWAAFFNLARHNAYITLTHIDRQLAYSKADITNDEDILFFKGQWKNLDNDLERKARLRSLILKHFSFLEGAAYGKKLFESQSSGNKSSKKKELTKKEKEELQANALSLDNLKSILFDFLQKLKDFRNYYSHYRHPESSELPLFDGNMLQRLYNVFDVSVQRVKRDHEHNDKVDPHRHFNHLVRKGKKDRCGNNDNPFFKHHFVDREEKVTEAGLLFFVSLFLEKRDAIWMQKKIRGFKGGTETYQQMTNEVFCRSRISLPKLKLESLRTDDWMLLDMLNELVRCPKSLYDRLREEDRARFRVPVDILSDEDDTDGTEEDPFKNTLVRHQDRFPYFALRYFDLKKVFTSLRFHIDLGTYHFAIYKKNIGEQPEDRHLTRNLYGFGRIQDFAEEHRPEEWKRLVRDLDYFETGDKPYITQTTPHYHIEKGKIGLRFVPEGQLLWPSPEVGATRTGRSKYAQDKRFTAEAFLSVHELMPMMFYYFLLREKYSEEASAERVQGRIKRVIEDVYAVYDAFARGEIDTLDRLDACLADKGIRRGHLPRQMIAILSQEHKDMEEKVRKKLQEMIADTDHRLDMLDRQTDRKIRIGRKNAGLPKSGVIADWLVRDMMRFQPVAKDTSGKPLNNSKANSTEYRMLQRALALFGGEKERLTPYFRQMNLTGGNNPHPFLHETRWESHTNILSFYRSYLKARKAFLQSIGRSDRVENHRFLLLKEPKTDRQTLVAGWKGEFHLPRGIFTEAVRDCLIEMGLDEVGSYKEVGFMAKAVPLYFERACKDRVQPFYDYPFNVGNSLKPKKGRFLSKEKRAEEWESGKERFRDLEAWSHSAARRIEDAFAGIENASRENKKKIEQLLQDLSLWETFESKLKVKADKINIAKLKKEILEAKEHPYLDFKSWQKFERELRLVKNQDIITWMMCRDLMEENKVEGLDTGTLYLKDIRTDVHEQGSLNVLNRVKPMRLPVVVYRADSRGHVHKEQAPLATVYIEERDTKLLKQGNFKSFVKDRRLNGLFSFVDTGALAMEQYPISKLRVEYELAKYQTARVCAFEQTLELEESLLTRYPHLPDKNFRKMLESWSDPLLDKWPDLHGNVRLLIAVRNAFSHNQYPMYDETLFSSIRKYDPSSPDAIEERMGLNIAHRLSEEVKQAKEMVERIIQA

SEQ ID NO: 98 - protein, 1115 aa, Bacterioides pyogenes
MESIKNSQKSTGKTLQKDPPYFGLYLNMALLNVRKVENHIRKWLGDVALLPEKSGFHSLLTTDNLSSAKWTRFYYKSRKFLPFLEMFDSDKKSYENRRETTECLDTIDRQKISSLLKEVYGKLQDIRNAFSHYHIDDQSVKHTALIISSEMHRFIENAYSFALQKTRARFTGVFVETDFLQAEEKGDNKKFFAIGGNEGIKLKDNALIFLICLFLDREEAFKFLSRATGFKSTKEKGFLAVRETFCALCCRQPHERLLSVNPREALLMDMLNELNRCPDILFEMLDEKDQKSFLPLLGEEEQAHILENSLNDELCEAIDDPFEMIASLSKRVRYKNRFPYLMLRYIEEKNLLPFIRFRIDLGCLELASYPKKMGEENNYERSVTDHAMAFGRLTDFHNEDAVLQQITKGITDEVRFSLYAPRYAIYNNKIGFVRTGGSDKISFPTLKKKGGEGHCVAYTLQNTKSFGFISIYDLRKILLLSFLDKDKAKNIVSGLLEQCEKHWKDLSENLFDAIRTELQKEFPVPLIRYTLPRSKGGKLVSSKLADKQEKYESEFERRKEKLTEILSEKDFDLSQIPRRMIDEWLNVLPTSREKKLKGYVETLKLDCRERLRVFEKREKGEHPVPPRIGEMATDLAKDIIRMVIDQGVKQRITSAYYSEIQRCLAQYAGDDNRRHLDSIIRELRLKDTKNGHPFLGKVLRPGLGHTEKLYQRYFEEKKEWLEATFYPAASPKRVPRFVNPPTGKQKELPLIIRNLMKERPEWRDWKQRKNSHPIDLPSQLFENEICRLLKDKIGKEPSGKLKWNEMFKLYWDKEFPNGMQRFYRCKRRVEVFDKVVEYEYSEEGGNYKKYYEALIDEVVRQKISSSKEKSKLQVEDLTLSVRRVFKRAINEKEYQLRLLCEDDRLLFMAVRDLYDWKEAQLDLDKIDNMLGEPVSVSQVIQLEGGQPDAVIKAECKLKDVSKLMRYCYDGRVKGLMPYFANHEATQEQVEMELRHYEDHRRRVFNWVFALEKSVLKNEKLRRFYEESQGGCEHRRCIDALRKASLVSEEEYEFLVHIRNKSAHNQFPDLEIGKLPPNVTSGFCECIWSKYKAIICRIIPFIDPERRFFGKLLEQK

SEQ ID NO: 99 - protein, 1135 aa, Porphymonas gingivalis
MNTVPASENKGQSRTVEDDPQYFGLYLNLARENLIEVESHVRIKFGKKKLNEESLKQSLLCDHLLSVDRWTKVYGHSRRYLPFLHYFDPDSQIEKDHDSKTGVDPDSAQRLIRELYSLLDFLRNDFSHNRLDGTTFEHLEVSPDISSFITGTYSLACGRAQSRFADFFKPDDFVLAKNRKEQLISVADGKECLTVSGLAFFICLFLDREQASGMLSRIRGFKRTDENWARAVHETFCDLCIRHPHDRLESSNTKEALLLDMLNELNRCPRILYDMLPEEERAQFLPALDENSMNNLSENSLNEESRLLWDGSSDWAEALTKRIRHQDRFPYLMLRFIEEMDLLKGIRFRVDLGEIELDSYSKKVGRNGEYDRTITDHALAFGKLSDFQNEEEVSRMISGEASYPVRFSLFAPRYAIYDNKIGYCHTSDPVYPKSKTGEKRALSNPRSMGFISVHDLRKLLLMELLCEGSFSRMQSDFLRKANRILDETAEGKLQFSALFPEMRHRFIPPQNPKSKDRREKAETTLEKYKQEIKGRKDKLNSQLLSAFDMDQRQLPSRLLDEWMNIRPASHSVKLRTYVKQLNEDCRLRLQKFRKDGDGKARAIPLVGEMATFLSQDIVRMIISEETKKLITSAYYNEMQRSLAQYAGEENRHQFRAIVAELRLLDPSSGHPFLSATMETAHRYTEDFYKCYLEKKREWLAKTFYRPEQDENTKRRISVFFVPDGEARKLLPLLIRRRMKEQNDLQDWIRNKQAHPIDLPSHLFDSKIMELLKVKDGKKKWNEAFKDWWSTKYPDGMQPFYGLRRELNIHGKSVSYIPSDGKKFADCYTHLMEKTVQDKKRELRTAGKPVPPDLAADIKRSFHRAVNEREFMLRLVQEDDRLMLMAINKMMTDREEDILPGLKNIDSILDEENQFSLAVHAKVLEKEGEGGDNSLSLVPATIEIKSKRKDWSKYIRYRYDRRVPGLMSHFPEHKATLDEVKTLLGEYDRCRIKIFDWAFALEGAIMSDRDLKPYLHESSSREGKSGEHSTLVKMLVEKKGCLTPDESQYLILIRNKAAHNQFPCAAEMPLIYRDVSAKVGSIEGSSAKDLPEGSSLVDSLWKKYEMIIRKILPILDPENRFFGKLLNNMSQPINDL

SEQ ID NO: 100 - protein, 1135 aa, Porphyromonas gingivalis
MNTVPASENKGQSRTVEDDPQYFGLYLNLARENLIEVESHVRIKFGKKKLNEESLKQSLLCDHLLSVDRWTKVYGHSRRYLPFLHYFDPDSQIEKDHDSKTGVDPDSAQRLIRELYSLLDFLRNDFSHNRLDGTTFEHLEVSPDISSFITGTYSLACGRAQSRFADFFKPDDFVLAKNRKEQLISVADGKECLTVSGLAFFICLFLDREQASGMLSRIRGFKRTDENWARAVHETFCDLCIRHPHDRLESSNTKEALLLDMLNELNRCPRILYDMLPEEERAQFLPALDENSMNNLSENSLNEESRLLWDGSSDWAEALTKRIRHQDRFPYLMLRFIEEMDLLKGIRFRVDLGEIELDSYSKKVGRNGEYDRTITDHALAFGKLSDFQNEEEVSRMISGEASYPVRFSLFAPRYAIYDNKIGYCHTSDPVYPKSKTGEKRALSNPQSMGFISVHDLRKLLLMELLCEGSFSRMQSGFLRKANRILDETAEGKLQFSALFPEMRHRFIPPQNPKSKDRREKAETTLEKYKQEIKGRKDKLNSQLLSAFDMNQRQLPSRLLDEWMNIRPASHSVKLRTYVKQLNEDCRLRLRKFRKDGDGKARAIPLVGEMATFLSQDIVRMIISEETKKLITSAYYNEMQRSLAQYAGEENRRQFRAIVAELHLLDPSSGHPFLSATMETAHRYTEDFYKCYLEKKREWLAKTFYRPEQDENTKRRISVFFVPDGEARKLLPLLIRRRMKEQNDLQDWIRNKQAHPIDLPSHLFDSKIMELLKVKDGKKKWNEAFKDWWSTKYPDGMQPFYGLRRELNIHGKSVSYIPSDGKKFADCYTHLMEKTVQDKKRELRTAGKPVPPDLAADIKRSFHRAVNEREFMLRLVQEDDRLMLMAINKMMTDREEDILPGLKNIDSILDEENQFSLAVHAKVLEKEGEGGDNSLSLVPATIEIKSKRKDWSKYIRYRYDRRVPGLMSHFPEHKATLDEVKTLLGEYDRCRIKIFDWAFALEGAIMSDRDLKPYLHESSSREGKSGEHSTLVKMLVEKKGCLTPDESQYLILIRNKAAHNQFPCAAEMPLIYRDVSAKVGSIEGSSAKDLPEGSSLVDSLWKKYEMIIRKILPILDHENRFFGKLLNNMSQPINDL

SEQ ID NO: 101 - protein, 1135 aa, Porphyromonas gingivalis
MNTVPASENKGQSRTVEDDPQYFGLYLNLARENLIEVESHVRIKFGKKKLNEESLKQSLLCDHLLSVDRWTKVYGHSRRYLPFLHYFDPDSQIEKDHDSKTGVDPDSAQRLIRELYSLLDFLRNDFSHNRLDGTTFEHLEVSPDISSFITGTYSLACGRAQSRFADFFKPDDFVLAKNRKEQLISVADGKECLTVSGLAFFICLFLDREQASGMLSRIRGFKRTDENWARAVHETFCDLCIRHPHDRLESSNTKEALLLDMLNELNRCPRILYDMLPEEERAQFLPALDENSMNNLSENSLNEESRLLWDGSSDWAEALTKRIRHQDRFPYLMLRFIEEMDLLKGIRFRVDLGEIELDSYSKKVGRNGEYDRTITDHALAFGKLSDFQNEEEVSRMISGEASYPVRFSLFAPRYAIYDNKIGYCHTSDPVYPKSKTGEKRALSNPRSMGFISVHDLRKLLLMELLCEGSFSRMQSDFLRKANRILDETAEGKLQFSALFPEMRHRFIPPQNPKSKDRREKAETTLEKYKQEIKGRKDKLNSQLLSAFDMDQRQLPSRLLDEWMNIRPASHSVKLRTYVKQLNEDCRLRLQKFRKDGDGKARAIPLVGEMATFLSQDIVRMIISEETKKLITSAYYNEMQRSLAQYAGEENRHQFRAIVAELRLLDPSSGHPFLSATMETAHRYTEDFYKCYLEKKREWLAKTFYRPEQDENTKRRISVFFVPDGEARKLLPLLIRRRMKEQNDLQDWIRNKQAHPIDLPSHLFDSKVMELLKVKDGKKKWNEAFKDWWSTKYPDGMQPFYGLRRELNIHGKSVSYIPSDGKKFADCYTHLMEKTVRDKKRELRTAGKPVPPDLAAYIKRSFHRAVNEREFMLRLVQEDDRLMLMAINKIMTDREEDILPGLKNIDSILDKENQFSLAVHAKVLEKEGEGGDNSLSLVPATIEIKSKRKDWSKYIRYRYDRRVPGLMSHFPEHKATLDEVKTLLGEYDRCRIKIFDWAFALEGAIMSDRDLKPYLHESSSREGKSGEHSTLVKMLVEKKGCLTPDESQYLILIRNKAAHNQFPCAAEIPLIYRDVSAKVGSIEGSSAKDLPEGSSLVDSLWKKYEMIIRKILPILDPENRFFGKLLNNMSQPINDL

SEQ ID NO: 102 - protein, 1125 aa, Prevotella intermedia
MKMEDDKKTTESTNMLDNKHFWAAFLNLARHNVYITVNHINKVLELKNKKDQDIIIDNDQDILAIKTHWEKVNGDLNKTERLRELMTKHFPFLETAIYTKNKEDKEEVKQEKQAEAQSLESLKDCLFLFLEKLQEARNYYSHYKYSESTKEPMLEEGLLEKMYNIFDDNIQLVIKDYQHNKDINPDEDFKHLDRKGQFKYSFADNEGNITESGLLFFVSLFLEKKDAIWMQQKLTGFKDNRESKKKMTHEVFCRRRMLLPKLRLESTQTQDWILLDMLNELIRCPKSLYERLQGEYRKKFNVPFDSADEDYDAEQEPFKNTLVRHQDRFPYFALRYFDYNEIFTNLRFQIDLGTYHFSIYKKLIGGQKEDRHLTHKLYGFERIQEFAKQNRPDEWKALVKDLDTYETSNERYISETTPHYHLENQKIGIRFRNGNKEIWPSLKTNGENNEKSKYKLDKPYQAEAFLSVHELLPMMFYYLLLKKEEPNNDKKNASIVEGFIKREIRDMYKLYDAFANGEINNIGDLEKYCEDKGIPKRHLPKQMVAILYDEPKDMVKEAKRKQKEMVKDTKKLLATLEKQTQEEIEDGGRNIRLLKSGEIARWLVNDMMRFQPVQKDNEGNPLNNSKANSTEYQMLQRSLALYNKEEKPTRYFRQVNLINSSNPHPFLKWTKWEECNNILSFYRNYLTKKIEFLNKLKPEDWEKNQYFLKLKEPKTNRETLVQGWKNGFNLPRGIFTEPIREWFKRHQNDSKEYEKVEALKRVGLVTKVIPLFFKEEYFKEDAQKEINNCVQPFYSFPYNVGNIHKPDEKDFLPSEERKKLWGDKKDKFKGYKAKVKSKKLTDKEKEEYRSYLEFQSWNKFERELRLVRNQDIVTWLLCTELIDKMKVEGLNVEELQKLRLKDIDTDTAKQEKNNILNRIMPMQLPVTVYEIDDSHNIVKDRPLHTVYIEETKTKLLKQGNFKALVKDRRLNGLFSFVDTSSKAELKDKPISKSVVEYELGEYQNARIETIKDMLLLEKTLIKKYEKLPTDNFSDMLNGWLEGKDESDKARFQNDVKLLVAVRNAFSHNQYPMRNRIAFANINPFSLSSADISEEKKLDIANQLKDKTHKIIKKIIEIEKPIETKE

SEQ ID NO: 103 - protein, 1161 aa, Bacteroides bacterium
MENQTQKGKGIYYYYTKNEDKHYFGSFLNLANNNIEQIIEEFRIRLSLKDEKNIKEIINNYFTDKKSYTDWERGINILKEYLPVIDYLDLAITDKEFEKIDLKQKETAKRKYFRTNFSLLIDTIIDLRNFYTHYFHKPISINPDVAKFLDKNLLNVCLDIKKQKMKTDKTKQALKDGLDKELKKLIELKKAELKEKKIKTWNITENVEGAVYNDAFNHMVYKNNAGVTILKDYHKSILPDDKIDSELKLNFSISGLVFLLSMFLSKKEIEQFKSNLEGFKGKVIGENGEYEISKFNNSLKYMATHWIFSYLTFKGLKQRVKNTFDKETLLMQMIDELNKVPHEVYQTLSKEQQNEFLEDINEYVQDNEENKKSMENSIVVHPVIRKRYDDKFNYFAIRFLDEFANFPTLKFFVTAGNFVHDKREKQIQGSMLTSDRMIKEKINVFGKLTEIAKYKSDYFSNENTLETSEWELFPNPSYLLIQNNIPVHIDLIHNTEEAKQCQIAIDRIKCTTNPAKKRNTRKSKEEIIKIIYQKNKNIKYGDPTALLSSNELPALIYELLVNKKSGKELENIIVEKIVNQYKTIAGFEKGQNLSNSLITKKLKKSEPNEDKINAEKIILAINRELEITENKLNIIKNNRAEFRTGAKRKHIFYSKELGQEATWIAYDLKRFMPEASRKEWKGFHHSELQKFLAFYDRNKNDAKALLNMFWNFDNDQLIGNDLNSAFREFHFDKFYEKYLIKRDEILEGFKSFISNFKDEPKLLKKGIKDIYRVFDKRYYIIKSTNAQKEQLLSKPICLPRGIFDNKPTYIEGVKVESNSALFADWYQYTYSDKHEFQSFYDMPRDYKEQFEKFELNNIKSIQNKKNLNKSDKFIYFRYKQDLKIKQIKSQDLFIKLMVDELFNVVFKNNIELNLKKLYQTSDERFKNQLIADVQKNREKGDTSDNKMNENFIWNMTIPLSLCNGQIEEPKVKLKDIGKFRKLETDDKVIQLLEYDKSKVWKKLEIEDELENMPNSYERIRREKLLKGIQEFEHFLLEKEKFDGINHPKHFEQDLNPNFKTYVINGVLRKNSKLNYTEIDKLLDLEHISIKDIETSAKEIHLAYFLIHVRNKFGHNQLPKLEAFELMKKYYKKNNEETYAEYFHKVSSQIVNEFKNSLEKHS

SEQ ID NO: 104 - protein, 1165 aa, Chryseobacterium jejuense
MEKTQTGLGIYYDHTKLQDKYFFGGFFNLAQNNIDNVIKAFIIKFFPERKDKDINIAQFLDICFKDNDADSDFQKKNKFLRIHFPVIGFLTSDNDKAGFKKKFALLLKTISELRNFYTHYYHKSIEFPSELFELLDDIFVKTTSEIKKLKKKDDKTQQLLNKNLSEEYDIRYQQQIERLKELKAQGKRVSLTDETAIRNGVFNAAFNHLIYRDGENVKPSRLYQSSYSEPDPAENGISLSQNSILFLLSMFLERKETEDLKSRVKGFKAKIIKQGEEQISGLKFMATHWVFSYLCFKGIKQKLSTEFHEETLLIQIIDELSKVPDEVYSAFDSKTKEKFLEDINEYMKEGNADLSLEDSKVIHPVIRKRYENKFNYFAIRFLDEYLSSTSLKFQVHVGNYVHDRRVKHINGTGFQTERIVKDRIKVFGRLSNISNLKADYIKEQLELPNDSNGWEIFPNPSYIFIDNNVPIHVLADEATKKGIELFKDKRRKEQPEELQKRKGKISKYNIVSMIYKEAKGKDKLRIDEPLALLSLNEIPALLYQILEKGATPKDIELIIKNKLTERFEKIKNYDPETPAPASQISKRLRNNTTAKGQEALNAEKLSLLIEREIENTETKLSSIEEKRLKAKKEQRRNTPQRSIFSNSDLGRIAAWLADDIKRFMPAEQRKNWKGYQHSQLQQSLAYFEKRPQEAFLLLKEGWDTSDGSSYWNNWVMNSFLENNHFEKFYKNYLMKRVKYFSELAGNIKQHTHNTKFLRKFIKQQMPADLFPKRHYILKDLETEKNKVLSKPLVFSRGLFDNNPTFIKGVKVTENPELFAEWYSYGYKTEHVFQHFYGWERDYNELLDSELQKGNSFAKNSIYYNRESQLDLIKLKQDLKIKKIKIQDLFLKRIAEKLFENVFNYPTTLSLDEFYLTQEERAEKERIALAQSLREEGDNSPNIIKDDFIWSKTIAFRSKQIYEPAIKLKDIGKFNRFVLDDEESKASKLLSYDKNKIWNKEQLERELSIGENSYEVIRREKLFKEIQNLELQILSNWSWDGINHPREFEMEDQKNTRHPNFKMYLVNGILRKNINLYKEDEDFWLESLKENDFKTLPSEVLETKSEMVQLLFLVILIRNQFAHNQLPEIQFYNFIRKNYPEIQNNTVAELYLNLIKLAVQKLKDNS

SEQ ID NO: 105 - protein, 1156 aa, Chryseobacterium carnipullorum
MNTRVTGMGVSYDHTKKEDKHFFGGFLNLAQDNITAVIKAFCIKFDKNPMSSVQFAESCFTDKDSDTDFQNKVRYVRTHLPVIGYLNYGGDRNTFRQKLSTLLKAVDSLRNFYTHYYHSPLALSTELFELLDTVFASVAVEVKQHKMKDDKTRQLLSKSLAEELDIRYKQQLERLKELKEQGKNIDLRDEAGIRNGVLNAAFNHLIYKEGEIAKPTLSYSSFYYGADSAENGITISQSGLLFLLSMFLGKKEIEDLKSRIRGFKAKIVRDGEENISGLKFMATHWIFSYLSFKGMKQRLSTDFHEETLLIQIIDELSKVPDEVYHDFDTATREKFVEDINEYIREGNEDFSLGDSTIIHPVIRKRYENKFNYFAVRFLDEFIKFPSLRFQVHLGNFVHDRRIKDIHGTGFQTERVVKDRIKVFGKLSEISSLKTEYIEKELDLDSDTGWEIFPNPSYVFIDNNIPIYISTNKTFKNGSSEFIKLRRKEKPEEMKMRGEDKKEKRDIASMIGNAGSLNSKTPLAMLSLNEMPALLYEILVKKTTPEEIELIIKEKLDSHFENIKNYDPEKPLPASQISKRLRNNTTDKGKKVINPEKLIHLINKEIDATEAKFALLAKNRKELKEKFRGKPLRQTIFSNMELGREATWLADDIKRFMPDILRKNWKGYQHNQLQQSLAFFNSRPKEAFTILQDGWDFADGSSFWNGWIINSFVKNRSFEYFYEAYFEGRKEYFSSLAENIKQHTSNHRNLRRFIDQQMPKGLFENRHYLLENLETEKNKILSKPLVFPRGLFDTKPTFIKGIKVDEQPELFAEWYQYGYSTEHVFQNFYGWERDYNDLLESELEKDNDFSKNSIHYSRTSQLELIKLKQDLKIKKIKIQDLFLKLIAGHIFENIFKYPASFSLDELYLTQEERLNKEQEALIQSQRKEGDHSDNIIKDNFIGSKTVTYESKQISEPNVKLKDIGKFNRFLLDDKVKTLLSYNEDKVWNKNDLDLELSIGENSYEVIRREKLFKKIQNFELQTLTDWPWNGTDHPEEFGTTDNKGVNHPNFKMYVVNGILRKHTDWFKEGEDNWLENLNETHFKNLSFQELETKSKSIQTAFLIIMIRNQFAHNQLPAVQFFEFIQKKYPEIQGSTTSELYLNFINLAVVELLELLEK

SEQ ID NO: 106 - protein, 1036 aa, Chryseobacterium ureilyticum
METQILGNGISYDHTKTEDKHFFGGFLNTAQNNIDLLIKAYISKFESSPRKLNSVQFPDVCFKKNDSDADFQHKLQFIRKHLPVIQYLKYGGNREVLKEKFRLLLQAVDSLRNFYTHFYHKPIQLPNELLTLLDTIFGEIGNEVRQNKMKDDKTRHLLKKNLSEELDFRYQEQLERLRKLKSEGKKVDLRDTEAIRNGVLNAAFNHLIFKDAEDFKPTVSYSSYYYDSDTAENGISISQSGLLFLLSMFLGRREMEDLKSRVRGFKARIIKHEEQHVSGLKFMATHWVFSEFCFKGIKTRLNADYHEETLLIQLIDELSKVPDELYRSFDVATRERFIEDINEYIRDGKEDKSLIESKIVHPVIRKRYESKFNYFAIRFLDEFVNFPTLRFQVHAGNYVHDRRIKSIEGTGFKTERLVKDRIKVFGKLSTISSLKAEYLAKAVNITDDTGWELLPHPSYVFIDNNIPIHLTVDPSFKNGVKEYQEKRKLQKPEEMKNRQGGDKMHKPAISSKIGKSKDINPESPVALLSMNEIPALLYEILVKKASPEEVEAKIRQKLTAVFERIRDYDPKVPLPASQVSKRLRNNTDTLSYNKEKLVELANKEVEQTERKLALITKNRRECREKVKGKFKRQKVFKNAELGTEATWLANDIKRFMPEEQKKNWKGYQHSQLQQSLAFFESRPGEARSLLQAGWDFSDGSSFWNGWVMNSFARDNTFDGFYESYLNGRMKYFLRLADNIAQQSSTNKLISNFIKQQMPKGLFDRRLYMLEDLATEKNKILSKPLIFPRGIFDDKPTFKKGVQVSEEPEAFADWYSYGYDVKHKFQEFYAWDRDYEELLREELEKDTAFTKNSIHYSRESQIELLAKKQDLKVKKVRIQDLYLKLMAEFLFENVFGHELALPLDQFYLTQEERLKQEQEAIVQSQRPKGDDSPNIVKENFIWSKTIPFKSGRVFEPNVKLKDIGKFRNLLTDEKVDILLSYNNTEIGKQVIENELIIGAGSYEFIRREQLFKEIQQMKRLSLRSVRGMGVPIRLNLK

SEQ ID NO: 107 - protein, 1127 aa, Prevotella buccae
MQKQDKLFVDRKKNAIFAFPKYITIMENQEKPEPIYYELTDKHFWAAFLNLARHNVYTTINHINRRLEIAELKDDGYMMDIKGSWNEQAKKLDKKVRLRDLIMKHFPFLEAAAYEITNSKSPNNKEQREKEQSEALSLNNLKNVLFIFLEKLQVLRNYYSHYKYSEESPKPIFETSLLKNMYKVFDANVRLVKRDYMHHENIDMQRDFTHLNRKKQVGRTKNIIDSPNFHYHFADKEGNMTIAGLLFFVSLFLDKKDAIWMQKKLKGFKDGRNLREQMTNEVFCRSRISLPKLKLENVQTKDWMQLDMLNELVRCPKSLYERLREKDRESFKVPFDIFSDDYDAEEEPFKNTLVRHQDRFPYFVLRYFDLNEIFEQLRFQIDLGTYHFSIYNKRIGDEDEVRHLTHHLYGFARIQDFAQQNQPEVWRKLVKDLDYFEASQEPYIPKTAPHYHLENEKIGIKFCSTHNNLFPSLKTEKTCNGRSKFNLGTQFTAEAFLSVHELLPMMFYYLLLTKDYSRKESADKVEGIIRKEISNIYAIYDAFANGEINSIADLTCRLQKTNILQGHLPKQMISILEGRQKDMEKEAERKIGEMIDDTQRRLDLLCKQTNQKIRIGKRNAGLLKSGKIADWLVNDMMRFQPVQKDQNNIPINNSKANSTEYRMLQRALALFGSENFRLKAYFNQMNLVGNDNPHPFLAETQWEHQTNILSFYRNYLEARKKYLKGLKPQNWKQYQHFLILKVQKTNRNTLVTGWKNSFNLPRGIFTQPIREWFEKHNNSKRIYDQILSFDRVGFVAKAIPLYFAEEYKDNVQPFYDYPFNIGNKLKPQKGQFLDKKERVELWQKNKELFKNYPSEKKKTDLAYLDFLSWKKFERELRLIKNQDIVTWLMFKELFNMATVEGLKIGEIHLRDIDTNTANEESNNILNRIMPMKLPVKTYETDNKGNILKERPLATFYIEETETKVLKQGNFKVLAKDRRLNGLLSFAETTDIDLEKNPITKLSVDHELIKYQTTRISIFEMTLGLEKKLINKYPTLPTDSFRNMLERWLQCKANRPELKNYVNSLIAVRNAFSHNQYPMYDATLFAEVKKFTLFPSVDTKKIELNIAPQLLEIVGKAIKEIEKSENKN

SEQ ID NO: 108 - protein, 1135 aa, Porphyromonas gingivalis
MNTVPASENKGQSRTVEDDPQYFGLYLNLARENLIEVESHVRIKFGKKKLNEESLKQSLLCDHLLSVDRWTKVYGHSRRYLPFLHYFDPDSQIEKDHDSKTGVDPDSAQRLIRELYSLLDFLRNDFSHNRLDGTTFEHLEVSPDISSFITGTYSLACGRAQSRFADFFKPDDFVLAKNRKEQLISVADGKECLTVSGLAFFICLFLDREQASGMLSRIRGFKRTDENWARAVHETFCDLCIRHPHDRLESSNTKEALLLDMLNELNRCPRILYDMLPEEERAQFLPALDENSMNNLSENSLNEESRLLWDGSSDWAEALTKRIRHQDRFPYLMLRFIEEMDLLKGIRFRVDLGEIELDSYSKKVGRNGEYDRTITDHALAFGKLSDFQNEEEVSRMISGEASYPVRFSLFAPRYAIYDNKIGYCHTSDPVYPKSKTGEKRALSNPQSMGFISVHNLRKLLLMELLCEGSFSRMQSDFLRKANRILDETAEGKLQFSALFPEMRHRFIPPQNPKSKDRREKAETTLEKYKQEIKGRKDKLNSQLLSAFDMNQRQLPSRLLDEWMNIRPASHSVKLRTYVKQLNEDCRLRLRKFRKDGDGKARAIPLVGEMATFLSQDIVRMIISEETKKLITSAYYNEMQRSLAQYAGEENRRQFRAIVAELHLLDPSSGHPFLSATMETAHRYTEDFYKCYLEKKREWLAKTFYRPEQDENTKRRISVFFVPDGEARKLLPLLIRRRMKEQNDLQDWIRNKQAHPIDLPSHLFDSKIMELLKVKDGKKKWNEAFKDWWSTKYPDGMQPFYGLRRELNIHGKSVSYIPSDGKKFADCYTHLMEKTVQDKKRELRTAGKPVPPDLAADIKRSFHRAVNEREFMLRLVQEDDRLMLMAINKMMTDREEDILPGLKNIDSILDEENQFSLAVHAKVLEKEGEGGDNSLSLVPATIEIKSKRKDWSKYIRYRYDRRVPGLMSHFPEHKATLDEVKTLLGEYDRCRIKIFDWAFALEGAIMSDRDLKPYLHESSSREGKSGEHSTLVKMLVEKKGCLTPDESQYLILIRNKAAHNQFPCAAEMPLIYRDVSAKVGSIEGSSAKDLPEGSSLVDSLWKKYEMIIRKILPILDPENRFFGKLLNNMSQPINDL

SEQ ID NO: 109 - protein, 1175 aa, Porphyromonas gingivalis
MTEQNEKPYNGTYYTLEDKHFWAAFFNLARHNAYITLAHIDRQLAYSKADITNDEDILFFKGQWKNLDNDLERKARLRSLILKHFSFLEGAAYGKKLFESQSSGNKSSKKKELTKKEKEELQANALSLDNLKSILFDFLQKLKDFRNYYSHYRHPESSELPLFDGNMLQRLYNVFDVSVQRVKRDHEHNDKVDPHRHFNHLVRKGKKDKYGNNDNPFFKHHFVDREEKVTEAGLLFFVSLFLEKRDAIWMQKKIRGFKGGTEAYQQMTNEVFCRSRISLPKLKLESLRTDDWMLLDMLNELVRCPKSLYDRLREEDRARFRVPVDILSDEDDTDGTEEDPFKNTLVRHQDRFPYFALRYFDLKKVFTSLRFHIDLGTYHFAIYKKNIGEQPEDRHLTRNLYGFGRIQDFAEEHRPEEWKRLVRDLDYFETGDKPYITQTTPHYHIEKGKIGLRFVPEGQLLWPSPEVGATRTGRSKYAQDKRFTAEAFLSVHELMPMMFYYFLLREKYSEEASAEKVQGRIKRVIEDVYAVYDAFARDEINTRDELDACLADKGIRRGHLPRQMIAILSQEHKDMEEKVRKKLQEMIADTDHRLDMLDRQTDRKIRIGRKNAGLPKSGVIADWLVRDMMRFQPVAKDTSGKPLNNSKANSTEYRMLQRALALFGGEKERLTPYFRQMNLTGGNNPHPFLHETRWESHTNILSFYRSYLKARKAFLQSIGRSDREENHRFLLLKEPKTDRQTLVAGWKSEFHLPRGIFTEAVRDCLIEMGYDEVGSYKEVGFMAKAVPLYFERACKDRVQPFYDYPFNVGNSLKPKKGRFLSKEKRAEEWESGKERFRDLEAWSHSAARRIEDAFVGIEYASWENKKKIEQLLQDLSLWETFESKLKVKADKINIAKLKKEILEAKEHPYHDFKSWQKFERELRLVKNQDIITWMMCRDLMEENKVEGLDTGTLYLKDIRTDVQEQGSLNVLNHVKPMRLPVVVYRADSRGHVHKEEAPLATVYIEERDTKLLKQGNFKSFVKDRRLNGLFSFVDTGALAMEQYPISKLRVEYELAKYQTARVCAFEQTLELEESLLTRYPHLPDESFREMLESWSDPLLDKWPDLQREVRLLIAVRNAFSHNQYPMYDETIFSSIRKYDPSSLDAIEERMGLNIAHRLSEEVKLAKEMVERIIQA

SEQ ID NO: 110 - protein, 1125 aa, Prevotella pallens; identical to SEQ ID NO: 92

SEQ ID NO: 111 - protein, 1157 aa, Myoides odoratimum; identical to SEQ ID NO: 93

SEQ ID NO: 112 - protein, 1157 aa, Myroides odoratimum; identical to SEQ ID NO: 94

SEQ ID NO: 113 - protein, 1127 aa, Prevotella sp.
MQKQDKLFVDRKKNAIFAFPKYITIMENQEKPEPIYYELTDKHFWAAFLNLARHNVYTTINHINRRLEIAELKDDGYMMGIKGSWNEQAKKLDKKVRLRDLIMKHFPFLEAAAYEITNSKSPNNKEQREKEQSEALSLNNLKNVLFIFLEKLQVLRNYYSHYKYSEESPKPIFETSLLKNMYKVFDANVRLVKRDYMHHENIDMQRDFTHLNRKKQVGRTKNIIDSPNFHYHFADKEGNMTIAGLLFFVSLFLDKKDAIWMQKKLKGFKDGRNLREQMTNEVFCRSRISLPKLKLENVQTKDWMQLDMLNELVRCPKSLYERLREKDRESFKVPFDIFSDDYDAEEEPFKNTLVRHQDRFPYFVLRYFDLNEIFEQLRFQIDLGTYHFSIYNKRIGDEDEVRHLTHHLYGFARIQDFAPQNQPEEWRKLVKDLDHFETSQEPYISKTAPHYHLENEKIGIKFCSTHNNLFPSLKREKTCNGRSKFNLGTQFTAEAFLSVHELLPMMFYYLLLTKDYSRKESADKVEGIIRKEISNIYAIYDAFANNEINSIADLTCRLQKTNILQGHLPKQMISILEGRQKDMEKEAERKIGEMIDDTQRRLDLLCKQTNQKIRIGKRNAGLLKSGKIADWLVSDMMRFQPVQKDTNNAPINNSKANSTEYRMLQHALALFGSESSRLKAYFRQMNLVGNANPHPFLAETQWEHQTNILSFYRNYLEARKKYLKGLKPQNWKQYQHFLILKVQKTNRNTLVTGWKNSFNLPRGIFTQPIREWFEKHNNSKRIYDQILSFDRVGFVAKAIPLYFAEEYKDNVQPFYDYPFNIGNKLKPQKGQFLDKKERVELWQKNKELFKNYPSEKNKTDLAYLDFLSWKKFERELRLIKNQDIVTWLMFKELFKTTTVEGLKIGEIHLRDIDTNTANEESNNILNRIMPMKLPVKTYETDNKGNILKERPLATFYIEETETKVLKQGNFKVLAKDRRLNGLLSFAETTDIDLEKNPITKLSVDYELIKYQTTRISIFEMTLGLEKKLIDKYSTLPTDSFRNMLERWLQCKANRPELKNYVNSLIAVRNAFSHNQYPMYDATLFAEVKKFTLFPSVDTKKIELNIAPQLLEIVGKAIKEIEKSENKN

SEQ ID NO: 114 - protein, 1119 aa, Porphyromonas gingivalis
MTEQNERPYNGTYYTLEDKHFWAAFFNLARHNAYITLAHIDRQLAYSKADITNDEDILFFKGQWKNLDNDLERKARLRSLILKHFSFLEGAAYGKKLFESQSSGNKSSKKKELTKKEKEELQANALSLDNLKSILFDFLQKLKDFRNYYSHYRHPESSELPLFDGNMLQRLYNVFDVSVQRVKRDHEHNDKVDPHRHFNHLVRKGKKDRYGNNDNPFFKHHFVDREEKVTEAGLLFFVSLFLEKRDAIWMQKKIRGFKGGTETYQQMTNEVFCRSRISLPKLKLESLRTDDWMLLDMLNELVRCPKSLYDRLREEDRARFRVPVDILSDEDDTDGTEEDPFKNTLVRHQDRFPYFALRYFDLKKVFTSLRFHIDLGTYHFAIYKKNIGEQPEDRHLTRNLYGFGRIQDFAEEHRPEEWKRLVRDLDYFETGDKPYITQTTPHYHIEKGKIGLRFVPEGQHLWPSPEVGATRTGRSKYAQDKRLTAEAFLSVHELMPMMFYYFLLREKYSDEASAERVQGRIKRVIEDVYAVYDAFARGEINTRDELDACLADKGIRRGHLPRQMIGILSQEHKDMEEKVRKKLQEMIVDTDHRLDMLDRQTDRKIRIGRKNAGLPKSGVIADWLVRDMMRFQPVAKDTSGKPLNNSKANSTEYRMLQRALALFGGEKERLTPYFRQMNLTGGNNPHPFLHETRWESHTNILSFYRSYLKARKAFLQSIGRSDRVENHRFLLLKEPKTDRQTLVAGWKGEFHLPRGIFTEAVRDCLIEMGLDEVGSYKEVGFMAKAVPLYFERACKDRVQPFYDYPFNVGNSLKPKKGRFLSKEKRAEEWESGKERFRLAKLKKEILEAKEHPYLDFKSWQKFERELRLVKNQDIITWMICRDLMEENKVEGLDTGTLYLKDIRTDVQEQGNLNVLNRVKPMRLPVVVYRADSRGHVHKEQAPLATVYIEERDTKLLKQGNFKSFVKDRRLNGLFSFVDTGALAMEQYPISKLRVEYELAKYQTARVCAFEQTLELEESLLTRYPHLPDKNFRKMLESWSDPLLDKWPDLHGNVRLLIAVRNAFSHNQYPMYDEAVFSSIRKYDPSSPDAIEERMGLNIAHRLSEEVKQAKEMAERIIQA

SEQ ID NO: 115 - protein, 1154 aa, Paludibacter propionicigenes
MKTSANNIYFNGINSFKKIFDSKGAIAPIAEKSCRNFDIKAQNDVNKEQRIHYFAVGHTFKQLDTENLFEYVLDENLRAKRPTRFISLQQFDKEFIENIKRLISDIRNINSHYIHRFDPLKIDAVPTNIIDFLKESFELAVIQIYLKEKGINYLQFSENPHADQKLVAFLHDKFLPLDEKKTSMLQNETPQLKEYKEYRKYFKTLSKQAAIDQLLFAEKETDYIWNLFDSHPVLTISAGKYLSFYSCLFLLSMFLYKSEANQLISKIKGFKKNTTEEEKSKREIFTFFSKRFNSMDIDSEENQLVKFRDLILYLNHYPVAWNKDLELDSSNPAMTDKLKSKIIELEINRSFPLYEGNERFATFAKYQIWGKKHLGKSIEKEYINASFTDEEITAYTYETDTCPELKDAHKKLADLKAAKGLFGKRKEKNESDIKKTETSIRELQHEPNPIKDKLIQRIEKNLLTVSYGRNQDRFMDFSARFLAEINYFGQDASFKMYHFYATDEQNSELEKYELPKDKKKYDSLKFHQGKLVHFISYKEHLKRYESWDDAFVIENNAIQLKLSFDGVENTVTIQRALLIYLLEDALRNIQNNTAENAGKQLLQEYYSHNKADLSAFKQILTQQDSIEPQQKTEFKKLLPRRLLNNYSPAINHLQTPHSSLPLILEKALLAEKRYCSLVVKAKAEGNYDDFIKRNKGKQFKLQFIRKAWNLMYFRNSYLQNVQAAGHHKSFHIERDEFNDFSRYMFAFEELSQYKYYLNEMFEKKGFFENNEFKILFQSGTSLENLYEKTKQKFEIWLASNTAKTNKPDNYHLNNYEQQFSNQLFFINLSHFINYLKSTGKLQTDANGQIIYEALNNVQYLIPEYYYTDKPERSESKSGNKLYNKLKATKLEDALLYEMAMCYLKADKQIADKAKHPITKLLTSDVEFNITNKEGIQLYHLLVPFKKIDAFIGLKMHKEQQDKKHPTSFLANIVNYLELVKNDKDIRKTYEAFSTNPVKRTLTYDDLAKIDGHLISKSIKFTNVTLELERYFIFKESLIVKKGNNIDFKYIKGLRNYYNNEKKKNEGIRNKAFHFGIPDSKSYDQLIRDAEVMFIANEVKPTHATKYTDLNKQLHTVCDKLMETVHNDYFSKEGDGKKKREAAGQKYFENIISAK

SEQ ID NO: 116 - protein, 1119 aa, Porphyromonas gingivalis
MTEQNEKPYNGTYYTLEDKHFWAAFFNLARHNAYITLAHIDRQLAYSKADITNDEDILFFKGQWKNLDNDLERKARLRSLILKHFSFLEGAAYGKKLFESQSSGNKSSKNKELTKKEKEELQANALSLDNLKSILFDFLQKLKDFRNYYSHYRHPESSELPLFDGNMLQRLYNVFDVSVQRVKRDHEHNDKVDPHRHFNHLVRKGKKDRYGNNDNPFFKHHFVDREGTVTEAGLLFFVSLFLEKRDAIWMQKKIRGFKGGTETYQQMTNEVFCRSRISLPKLKLESLRTDDWMLLDMLNELVRCPKSLYDRLREEDRARFRVPVDILSDEEDTDGAEEDPFKNTLVRHQDRFPYFALRYFDLKKVFTSLRFQIDLGTYHFAIYKKNIGEQPEDRHLTRNLYGFGRIQDFAEEHRPEEWKRLVRDLDYFETGDKPYITQTTPHYHIEKGKIGLRFVPEGQHLWPSPEVGATRTGRSKYAQDKRFTAEAFLSAHELMPMMFYYFLLREKYSEEASAERVQGRIKRVIEDVYAVYDAFARDEINTRDELDACLADKGIRRGHLPRQMIGILSQEHKDMEEKIRKKLQEMMADTDHRLDMLDRQTDRKIRIGRKNAGLPKSGVIADWLVRDMMRFQPVAKDTSGKPLNNSKANSTEYRMLQRALALFGGEKERLTPYFRQMNLTGGNNPHPFLHETRWESHTNILSFYRSYLKARKAFLQSIGRSDRVENHRFLLLKEPKTDRQTLVAGWKGEFHLPRGIFTEAVRDCLIEMGLDEVGSYKEVGFMAKAVPLYFERACKDWVQPFYNYPFNVGNSLKPKKGRFLSKEKRAEEWESGKERFRLAKLKKEILEAKEHPYLDFKSWQKFERELRLVKNQDIITWMICGDLMEENKVEGLDTGTLYLKDIRTDVQEQGSLNVLNRVKPMRLPVVVYRADSRGHVHKEQAPLATVYIEERDTKLLKQGNFKSFVKDRRLNGLFSFVDTGALAMEQYPISKLRVEYELAKYQTARVCAFEQTLELEESLLTRCPHLPDKNFRKMLESWSDPLLDKWPDLHRKVRLLIAVRNAFSHNQYPMYDEAVFSSIRKYDPSFPDAIEERMGLNIAHRLSEEVKQAKETVERIIQA

SEQ ID NO: 117 - protein, 1179 aa, Flavobacterium columnare
MSSKNESYNKQKTFNHYKQEDKYFFGGFLNNADDNLRQVGKEFKTRINFNHNNNELASVFKDYFNKEKSVAKREHALNLLSNYFPVLERIQKHTNHNFEQTREIFELLLDTIKKLRDYYTHHYHKPITINPKIYDFLDDTLLDVLITIKKKKVKNDTSRELLKEKLRPELTQLKNQKREELIKKGKKLLEENLENAVFNHCLRPFLEENKTDDKQNKTVSLRKYRKSKPNEETSITLTQSGLVFLMSFFLHRKEFQVFTSGLEGFKAKVNTIKEEEISLNKNNIVYMITHWSYSYYNFKGLKHRIKTDQGVSTLEQNNTTHSLTNTNTKEALLTQIVDYLSKVPNEIYETLSEKQQKEFEEDINEYMRENPENEDSTFSSIVSHKVIRKRYENKFNYFAMRFLDEYAELPTLRFMVNFGDYIKDRQKKILESIQFDSERIIKKEIHLFEKLSLVTEYKKNVYLKETSNIDLSRFPLFPNPSYVMANNNIPFYIDSRSNNLDEYLNQKKKAQSQNKKRNLTFEKYNKEQSKDAIIAMLQKEIGVKDLQQRSTIGLLSCNELPSMLYEVIVKDIKGAELENKIAQKIREQYQSIRDFTLDSPQKDNIPTTLIKTINTDSSVTFENQPIDIPRLKNAIQKELTLTQEKLLNVKEHEIEVDNYNRNKNTYKFKNQPKNKVDDKKLQRKYVFYRNEIRQEANWLASDLIHFMKNKSLWKGYMHNELQSFLAFFEDKKNDCIALLETVFNLKEDCILTKGLKNLFLKHGNFIDFYKEYLKLKEDFLNTESTFLENGLIGLPPKILKKELSKRFKYIFIVFQKRQFIIKELEEKKNNLYADAINLSRGIFDEKPTMIPFKKPNPDEFASWFVASYQYNNYQSFYELTPDIVERDKKKKYKNLRAINKVKIQDYYLKLMVDTLYQDLFNQPLDKSLSDFYVSKAEREKIKADAKAYQKRNDSSLWNKVIHLSLQNNRITANPKLKDIGKYKRALQDEKIATLLTYDDRTWTYALQKPEKENENDYKELHYTALNMELQEYEKVRSKELLKQVQELEKQILEEYTDFLSTQIHPADFEREGNPNFKKYLAHSILENEDDLDKLPEKVEAMRELDETITNPIIKKAIVLIIIRNKMAHNQYPPKFIYDLANRFVPKKEEEYFATYFNRVFETITKELWENKEKKDKTQV

SEQ ID NO: 118 - protein, 1145 aa, Psychroflexus torquis
MESIIGLGLSFNPYKTADKHYFGSFLNLVENNLNAVFAEFKERISYKAKDENISSLIEKHFIDNMSIVDYEKKISILNGYLPIIDFLDDELENNLNTRVKNFKKNFIILAEAIEKLRDYYTHFYHDPITFEDNKEPLLELLDEVLLKTILDVKKKYLKTDKTKEILKDSLREEMDLLVIRKTDELREKKKTNPKIQHTDSSQIKNSIFNDAFQGLLYEDKGNNKKTQVSHRAKTRLNPKDIHKQEERDFEIPLSTSGLVFLMSLFLSKKEIEDFKSNIKGFKGKVVKDENHNSLKYMATHRVYSILAFKGLKYRIKTDTFSKETLMMQMIDELSKVPDCVYQNLSETKQKDFIEDWNEYFKDNEENTENLENSRVVHPVIRKRYEDKFNYFAIRFLDEFANFKTLKFQVFMGYYIHDQRTKTIGTTNITTERTVKEKINVFGKLSKMDNLKKHFFSQLSDDENTDWEFFPNPSYNFLTQADNSPANNIPIYLELKNQQIIKEKDAIKAEVNQTQNRNPNKPSKRDLLNKILKTYEDFHQGDPTAILSLNEIPALLHLFLVKPNNKTGQQIENIIRIKIEKQFKAINHPSKNNKGIPKSLFADTNVRVNAIKLKKDLEAELDMLNKKHIAFKENQKASSNYDKLLKEHQFTPKNKRPELRKYVFYKSEKGEEATWLANDIKRFMPKDFKTKWKGCQHSELQRKLAFYDRHTKQDIKELLSGCEFDHSLLDINAYFQKDNFEDFFSKYLENRIETLEGVLKKLHDFKNEPTPLKGVFKNCFKFLKRQNYVTESPEIIKKRILAKPTFLPRGVFDERPTMKKGKNPLKDKNEFAEWFVEYLENKDYQKFYNAEEYRMRDADFKKNAVIKKQKLKDFYTLQMVNYLLKEVFGKDEMNLQLSELFQTRQERLKLQGIAKKQMNKETGDSSENTRNQTYIWNKDVPVSFFNGKVTIDKVKLKNIGKYKRYERDERVKTFIGYEVDEKWMMYLPHNWKDRYSVKPINVIDLQIQEYEEIRSHELLKEIQNLEQYIYDHTTDKNILLQDGNPNFKMYVLNGLLIGIKQVNIPDFIVLKQNTNFDKIDFTGIASCSELEKKTIILIAIRNKFAHNQLPNKMIYDLANEFLKIEKNETYANYYLKVLKKMISDLA

SEQ ID NO: 119 - protein, 948 aa, Riemerella anatipestifer
MFFSFHNAQRVIFKHLYKAFDASLRMVKEDYKAHFTVNLTRDFAHLNRKGKNKQDNPDFNRYRFEKDGFFTESGLLFFTNLFLDKRDAYWMLKKVSGFKASHKQREKMTTEVFCRSRILLPKLRLESRYDHNQMLLDMLSELSRCPKLLYEKLSEENKKHFQVEADGFLDEIEEEQNPFKDTLIRHQDRFPYFALRYLDLNESFKSIRFQVDLGTYHYCIYDKKIGDEQEKRHLTRTLLSFGRLQDFTEINRPQEWKALTKDLDYKETSNQPFISKTTPHYHITDNKIGFRLGTSKELYPSLEIKDGANRIAKYPYNSGFVAHAFISVHELLPLMFYQHLTGKSEDLLKETVRHIQRIYKDFEEERINTIEDLEKANQGRLPLGAFPKQMLGLLQNKQPDLSEKAKIKIEKLIAETKLLSHRLNTKLKSSPKLGKRREKLIKTGVLADWLVKDFMRFQPVAYDAQNQPIKSSKANSTEFWFIRRALALYGGEKNRLEGYFKQTNLIGNTNPHPFLNKFNWKACRNLVDFYQQYLEQREKFLEAIKHQPWEPYQYCLLLKVPKENRKNLVKGWEQGGISLPRGLFTEAIRETLSKDLTLSKPIRKEIKKHGRVGFISRAITLYFKEKYQDKHQSFYNLSYKLEAKAPLLKKEEHYEYWQQNKPQSPTESQRLELHTSDRWKDYLLYKRWQHLEKKLRLYRNQDIMLWLMTLELTKNHFKELNLNYHQLKLENLAVNVQEADAKLNPLNQTLPMVLPVKVYPTTAFGEVQYHETPIRTVYIREEQTKALKMGNFKALVKDRRLNGLFSFIKEENDTQKHPISQLRLRRELEIYQSLRVDAFKETLSLEEKLLNKHASLSSLENEFRTLLEEWKKKYAASSMVTDKHIAFIASVRNAFCHNQYPFYKETLHAPILLFTVAQPTTEEKDGLGIAEALLKVLREYCEIVKSQI

SEQ ID NO: 120 - protein, 1139 aa, Prevotella pleuritidis
MENDKRLEESACYTLNDKHFWAAFLNLARHNVYITVNHINKTLELKNKKNQEIIIDNDQDILAIKTHWAKVNGDLNKTDRLRELMIKHFPFLEAAIYSNNKEDKEEVKEEKQAKAQSFKSLKDCLFLFLEKLQEARNYYSHYKYSESSKEPEFEEGLLEKMYNTFDASIRLVKEDYQYNKDIDPEKDFKHLERKEDFNYLFTDKDNKGKITKNGLLFFVSLFLEKKDAIWMQQKFRGFKDNRGNKEKMTHEVFCRSRMLLPKIRLESTQTQDWILLDMLNELIRCPKSLYERLQGAYREKFKVPFDSIDEDYDAEQEPFRNTLVRHQDRFPYFALRYFDYNEIFKNLRFQIDLGTYHFSIYKKLIGGKKEDRHLTHKLYGFERIQEFTKQNRPDKWQAIIKDLDTYETSNERYISETTPHYHLENQKIGIRFRNDNNDIWPSLKTNGEKNEKSKYNLDKPYQAEAFLSVHELLPMMFYYLLLKMENTDNDKEDNEVGTKKKGNKNNKQEKHKIEEIIENKIKDIYALYDAFTNGEINSIDELAEQREGKDIEIGHLPKQLIVILKNKSKDMAEKANRKQKEMIKDTKKRLATLDKQVKGEIEDGGRNIRLLKSGEIARWLVNDMMRFQPVQKDNEGKPLNNSKANSTEYQMLQRSLALYNKEEKPTRYFRQVNLIKSSNPHPFLEDTKWEECYNILSFYRNYLKAKIKFLNKLKPEDWKKNQYFLMLKEPKTNRKTLVQGWKNGFNLPRGIFTEPIKEWFKRHQNDSEEYKKVEALDRVGLVAKVIPLFFKEEYFKEDAQKEINNCVQPFYSFPYNVGNIHKPEEKNFLHCEERRKLWDKKKDKFKGYKAKEKSKKMTDKEKEEHRSYLEFQSWNKFERELRLVRNQDILTWLLCTKLIDKLKIDELNIEELQKLRLKDIDTDTAKKEKNNILNRVMPMRLPVTVYEIDKSFNIVKDKPLHTVYIEETGTKLLKQGNFKALVKDRRLNGLFSFVKTSSEAESKSKPISKLRVEYELGAYQKARIDIIKDMLALEKTLIDNDENLPTNKFSDMLKSWLKGKGEANKARLQNDVGLLVAVRNAFSHNQYPMYNSEVFKGMKLLSLSSDIPEKEGLGIAKQLKDKIKETIERIIEIEKEIRN

SEQ ID NO: 121 - protein, 1135 aa, Porphyromonas gingivalis; identical to SEQ ID NO: 99

SEQ ID NO: 122 - protein, 1135 aa, Porphyromonas gingivalis
MNTVPASENKGQSRTVEDDPQYFGLYLNLARENLIEVESHVRIKFGKKKLNEESLKQSLLCDHLLSVDRWTKVYGHSRRYLPFLHYFDPDSQIEKDHDSKTGVDPDSAQRLIRELYSLLDFLRNDFSHNRLDGTTFEHLEVSPDISSFITGTYSLACGRAQSRFADFFKPDDFVLAKNRKEQLISVADGKECLTVSGLAFFICLFLDREQASGMLSRIRGFKRTNENWARAVHETFCDLCIRHPHDRLESSNTKEALLLDMLNELNRCPRILYDMLPEEERAQFLPALDENSMNNLSENSLNEESRLLWDGSSDWAEALTKRIRHQDRFPYLMLRFIEEMDLLKGIRFRVDLGEIELDSYSKKVGRNGEYDRTITDHALAFGKLSDFQNEEEVSRMISGEASYPVRFSLFAPRYAIYDNKIGYCHTSDPVYPKSKTGEKRALSNPQSMGFISVHDLRKLLLMELLCEGSFSRMQSGFLRKANRILDETAEGKLQFSALFPEMRHRFIPPQNPKSKDRREKAETTLEKYKQEIKGRKDKLNSQLLSAFDMNQRQLPSRLLDEWMNIRPASHSVKLRTYVKQLNEDCRLRLRKFRKDGDGKARAIPLVGEMATFLSQDIVRMIISEETKKLITSAYYNEMQRSLAQYAGEENRRQFRAIVAELHLLDPSSGHPFLSATMETAHRYTEDFYKCYLEKKREWLAKTFYRPEQDENTKRRISVFFVPDGEARKLLPLLIRRRMKEQNDLQDWIRNKQAHPIDLPSHLFDSKIMELLKVKDGKKKWNEAFKDWWSTKYPDGMQPFYGLRRELNIHGKSVSYIPSDGKKFADCYTHLMEKTVQDKKRELRTAGKPVPPDLAADIKRSFHRAVNEREFMLRLVQEDDRLMLMAINKMMTDREEDILPGLKNIDSILDKENQFSLAVHAKVLEKEGEGGDNSLSLVPATIEIKSKRKDWSKYIRYRYDRRVPGLMSHFPEHKATLDEVKTLLGEYDRCRIKIFDWAFALEGAIMSDRDLKPYLHESSSREGKSGEHSTLVKMLVEKKGCLTPDESQYLILIRNKAAHNQFPCAAEMPLIYRDVSAKVGSIEGSSAKDLPEGSSLVDSLWKKYEMIIRKILPILDHENRFFGKLLNNMSQPINDL

SEQ ID NO: 123 - protein, 1135 aa, Porphyromonas gingivalis; identical to SEQ ID NO: 100

SEQ ID NO: 124 - protein, 1135 aa, Porphyromonas gingivalis; identical to SEQ ID NO: 101

SEQ ID NO: 125 - protein, 1135 aa, Porphyromonas gingivalis
MNTVPASENKGQSRTVEDDPQYFGLYLNLARENLIEVESHVRIKFGKKKLNEESLKQSLLCDHLLSVDRWTKVYGHSRRYLPFLHYFDPDSQIEKDHDSKTGVDPDSAQRLIRELYSLLDFLRNDFSHNRLDGTTFEHLEVSPDISSFITGTYSLACGRAQSRFADFFKPDDFVLAKNRKEQLISVADGKECLTVSGLAFFICLFLDREQASGMLSRIRGFKRTDENWARAVHETFCDLCIRHPHDRLESSNTKEALLLDMLNELNRCPRILYDMLPEEERAQFLPALDENSMNNLSENSLNEESRLLWDGSSDWAEALTKRIRHQDRFPYLMLRFIEEMDLLKGIRFRVDLGEIELDSYSKKVGRNGEYDRTITDHALAFGKLSDFQNEEEVSRMISGEASYPVRFSLFAPRYAIYDNKIGYCHTSDPVYPKSKTGEKRALSNPRSMGFISVHDLRKLLLMELLCEGSFSRMQSDFLRKANRILDETAEGKLQFSALFPEMRHRFIPPQNPKSKDRREKAETTLEKYKQEIKGRKDKLNSQLLSAFDMNQRQLPSRLLDEWMNIRPASHSVKLRTYVKQLNEDCRLRLRKFRKDGDGKARAIPLVGEMATFLSQDIVRMIISEETKKLITSAYYNEMQRSLAQYAGEENRRQFRAIVAELHLLDPSSGHPFLSATMETAHRYTEDFYKCYLEKKREWLAKTFYRPEQDENTKRRISVFFVPDGEARKLLPLLIRRRMKEQNDLQDWIRNKQAHPIDLPSHLFDSKIMELLKVKDGKKKWNEAFKDWWSTKYPDGMQPFYGLRRELNIHGKSVSYIPSDGKKFADCYTHLMEKTVQDKKRELRTAGKPVPPDLAADIKRSFHRAVNEREFMLRLVQEDDRLMLMAINKMMTDREEDILPGLKNIDSILDEENQFSLAVHAKVLEKEGEGGDNSLSLVPATIEIKSKRKDWSKYIRYRYDRRVPGLMSHFPEHKATLDEVKTLLGEYDRCRIKIFDWAFALEGAIMSDRDLKPYLHESSSREGKSGEHSTLVKMLVEKKGCLTPDESQYLILIRNKAAHNQFPCAAEMPLIYRDVSAKVGSIEGSSAKDLPEGSSLVDSLWKKYEMIIRKILPILDPENRFFGKLLNNMSQPINDL

SEQ ID NO: 126 - protein, 1133 aa, Prevotella falsenii
MKNDNNSTKSTDYTLGDKHFWAAFLNLARHNVYITVNHINKVLELKNKKDQEIIIDNDQDILAIKTLWGKVDTDINKKDRLRELIMKHFPFLEAATYQQSSTNNTKQKEEEQAKAQSFESLKDCLFLFLEKLREARNYYSHYKHSKSLEEPKLEEKLLENMYNIFDTNVQLVIKDYEHNKDINPEEDFKHLGRAEGEFNYYFTRNKKGNITESGLLFFVSLFLEKKDAIWAQTKIKGFKDNRENKQKMTHEVFCRSRMLLPKLRLESTQTQDWILLDMLNELIRCPKSLYKRLQGEKREKFRVPFDPADEDYDAEQEPFKNTLVRHQDRFPYFALRYFDYNEIFTNLRFQIDLGTYHFSIYKKQIGDKKEDRHLTHKLYGFERIQEFAKENRPDEWKALVKDLDTFEESNEPYISETTPHYHLENQKIGIRNKNKKKKKTIWPSLETKTTVNERSKYNLGKSFKAEAFLSVHELLPMMFYYLLLNKEEPNNGKINASKVEGIIEKKIRDIYKLYGAFANEEINNEEELKEYCEGKDIAIRHLPKQMIAILKNEYKDMAKKAEDKQKKMIKDTKKRLAALDKQVKGEVEDGGRNIKPLKSGRIASWLVNDMMRFQPVQRDRDGYPLNNSKANSTEYQLLQRTLALFGSERERLAPYFRQMNLIGKDNPHPFLKDTKWKEHNNILSFYRSYLEAKKNFLGSLKPEDWKKNQYFLKLKEPKTNRETLVQGWKNGFNLPRGIFTEPIREWFIRHQNESEEYKKVKDFDRIGLVAKVIPLFFKEDYQKEIEDYVQPFYGYPFNVGNIHNSQEGTFLNKKEREELWKGNKTKFKDYKTKEKNKEKTNKDKFKKKTDEEKEEFRSYLDFQSWKKFERELRLVRNQDIVTWLLCMELIDKLKIDELNIEELQKLRLKDIDTDTAKKEKNNILNRIMPMELPVTVYETDDSNNIIKDKPLHTIYIKEAETKLLKQGNFKALVKDRRLNGLFSFVETSSEAELKSKPISKSLVEYELGEYQRARVEIIKDMLRLEETLIGNDEKLPTNKFRQMLDKWLEHKKETDDTDLKNDVKLLTEVRNAFSHNQYPMRDRIAFANIKPFSLSSANTSNEEGLGIAKKLKDKTKETIDRIIEIEEQTATKR

SEQ ID NO: 127 - protein, 1116 aa, Prevotella pleuritidis
MENDKRLEESTCYTLNDKHFWAAFLNLARHNVYITINHINKLLEIRQIDNDEKVLDIKALWQKVDKDINQKARLRELMIKHFPFLEAAIYSNNKEDKEEVKEEKQAKAQSFKSLKDCLFLFLEKLQEARNYYSHYKSSESSKEPEFEEGLLEKMYNTFGVSIRLVKEDYQYNKDIDPEKDFKHLERKEDFNYLFTDKDNKGKITKNGLLFFVSLFLEKKDAIWMQQKLRGFKDNRGNKEKMTHEVFCRSRMLLPKIRLESTQTQDWILLDMLNELIRCPKSLYERLQGAYREKFKVPFDSIDEDYDAEQEPFRNTLVRHQDRFPYFALRYFDYNEIFKNLRFQIDLGTYHFSIYKKLIGDNKEDRHLTHKLYGFERIQEFAKQKRPNEWQALVKDLDIYETSNEQYISETTPHYHLENQKIGIRFKNKKDKIWPSLETNGKENEKSKYNLDKSFQAEAFLSIHELLPMMFYDLLLKKEEPNNDEKNASIVEGFIKKEIKRMYAIYDAFANEEINSKEGLEEYCKNKGFQERHLPKQMIAILTNKSKNMAEKAKRKQKEMIKDTKKRLATLDKQVKGEIEDGGRNIRLLKSGEIARWLVNDMMRFQSVQKDKEGKPLNNSKANSTEYQMLQRSLALYNKEQKPTPYFIQVNLIKSSNPHPFLEETKWEECNNILSFYRSYLEAKKNFLESLKPEDWKKNQYFLMLKEPKTNRKTLVQGWKNGFNLPRGIFTEPIKEWFKRHQNDSEEYKKVEALDRVGLVAKVIPLFFKEEYFKEDAQKEINNCVQPFYSFPYNVGNIHKPEEKNFLHCEERRKLWDKKKDKFKGYKAKEKSKKMTDKEKEEHRSYLEFQSWNKFERELRLVRNQDIVTWLLCTELIDKLKIDELNIEELQKLRLKDIDTDTAKKEKNNILNRIMPMQLPVTVYEIDKSFNIVKDKPLHTIYIEETGTKLLKQGNFKALVKDRRLNGLFSFVKTSSEAESKSKPISKLRVEYELGAYQKARIDIIKDMLALEKTLIDNDENLPTNKFSDMLKSWLKGKGEANKARLQNDVDLLVAIRNAFSHNQYPMYNSEVFKGMKLLSLSSDIPEKEGLGIAKQLKDKIKETIERIIEIEKEIRN

SEQ ID NO: 128 - protein, 1119 aa, Porphyromonas gingivalis
MTEQNERPYNGTYYTLEDKHFWAAFFNLARHNAYITLAHIDRQLAYSKADITNDEDILFFKGQWKNLDNDLERKARLRSLILKHFSFLEGAAYGKKLFESQSSGNKSSKKKELTKKEKEELQANALSLDNLKSILFDFLQKLKDFRNYYSHYRHPESSELPLFDGNMLQRLYNVFDVSVQRVKRDHEHNDKVDPHRHFNHLVRKGKKDRYGNNDNPFFKHHFVDREGTVTEAGLLFFVSLFLEKRDAIWMQKKIRGFKGGTEAYQQMTNEVFCRSRISLPKLKLESLRTDDWMLLDMLNELVRCPKSLYDRLREEDRARFRVPIDILSDEDDTDGTEEDPFKNTLVRHQDRFPYFALRYFDLKKVFTSLRFHIDLGTYHFAIYKKNIGEQPEDRHLTRNLYGFGRIQDFAEEHRPEEWKRLVRDLDYFETGDKPYITQTTPHYHIEKGKIGLRFVPEGQHLWPSPEVGATRTGRSKYAQDKRLTAEAFLSVHELMPMMFYYFLLREKYSEEVSAEKVQGRIKRVIEDVYAVYDAFARGEIDTLDRLDACLADKGIRRGHLPRQMIAILSQEHKDMEEKVRKKLQEMIADTDHRLDMLDRQTDRKIRIGRKNAGLPKSGVIADWLVRDMMRFQPVAKDTSGKPLNNSKANSTEYRMLQRALALFGGEKERLTPYFRQMNLTGGNNPHPFLHETRWESHTNILSFYRSYLKARKAFLQSIGRSDREENHRFLLLKEPKTDRQTLVAGWKSEFHLPRGIFTEAVRDCLIEMGYDEVGSYKEVGFMAKAVPLYFERACKDRVQPFYDYPFNVGNSLKPKKGRFLSKEKRAEEWESGKERFRLAKLKKEILEAKEHPYLDFKSWQKFERELRLVKNQDIITWMMCRDLMEENKVEGLDTGTLYLKDIRTDVHEQGSLNVLNRVKPMRLPVVVYRADSRGHVHKEQAPLATVYIEERDTKLLKQGNFKSFVKDRRLNGLFSFVDTGALAMEQYPISKLRVEYELAKYQTARVCAFEQTLELEESLLTRYPHLPDKNFRKMLESWSDPLLDKWPDLHRKVRLLIAVRNAFSHNQYPMYDEAVFSSIRKYDPSSPDAIEERMGLNIAHRLSEEVKQAKEMAERIIQV

SEQ ID NO: 129 - protein, 1175 aa, Porphyromonas gulae
MTEQSERPYNGTYYTLEDKHFWAAFLNLARHNAYITLTHIDRQLAYSKADITNDQDVLSFKALWKNLDNDLERKSRLRSLILKHFSFLEGAAYGKKLFESKSSGNKSSKNKELTKKEKEELQANALSLDNLKSILFDFLQKLKDFRNYYSHYRHSGSSELPLFDGNMLQRLYNVFDVSVQRVKRDHEHNDKVDPHRHFNHLVRKGKKDRYGHNDNPSFKHHFVDSEGMVTEAGLLFFVSLFLEKRDAIWMQKKIRGFKGGTETYQQMTNEVFCRSRISLPKLKLESLRMDDWMLLDMLNELVRCPKPLYDRLREDDRACFRVPVDILPDEDDTDGGGEDPFKNTLVRHQDRFPYFALRYFDLKKVFTSLRFHIDLGTYHFAIYKKMIGEQPEDRHLTRNLYGFGRIQDFAEEHRPEEWKRLVRDLDYFETGDKPYISQTSPHYHIEKGKIGLRFMPEGQHLWPSPEVGTTRTGRSKYAQDKRLTAEAFLSVHELMPMMFYYFLLREKYSEEVSAEKVQGRIKRVIEDVYAIYDAFARDEINTLKELDACLADKGIRRGHLPKQMIAILSQEHKNMEEKVRKKLQEMIADTDHRLDMLDRQTDRKIRIGRKNAGLPKSGVIADWLVRDMMRFQPVAKDASGKPLNNSKANSTEYRMLQRALALFGGEKERLTPYFRQMNLTGGNNPHPFLHDTRWESHTNILSFYRSYLRARKAFLERIGRSDRMENRPFLLLKEPKTDRQTLVAGWKSEFHLPRGIFTEAVRDCLIEMGYDEVGSYREVGFMAKAVPLYFERACEDRVQPFYDSPFNVGNSLKPKKGRFLSKEERAEEWERGKERFRDLEAWSHSAARRIEDAFAGIEYASPGNKKKIEQLLRDLSLWEAFESKLKVRADKINLAKLKKEILEAQEHPYHDFKSWQKFERELRLVKNQDIITWMMCRDLMEENKVEGLDTGTLYLKDIRTNVQEQGSLNVLNHVKPMRLPVVVYRADSRGHVHKEEAPLATVYIEERDTKLLKQGNFKSFVKDRRLNGLFSFVDTGGLAMEQYPISKLRVEYELAKYQTARVCAFEQTLELEESLLTRYPHLPDKNFRKMLESWSDPLLAKWPELHGKVRLLIAVRNAFSHNQYPMYDEAVFSSIRKYDPSSPDAIEERMGLNIAHRLSEEVKQAKETVERIIQA

SEQ ID NO: 130 - protein, 1119 aa, Porphyromonas gulae
MTEQSERPYNGTYYTLEDKHFWAAFLNLARHNAYITLTHIDRQLAYSKADITNDQDVLSFKALWKNLDNDLERKSRLRSLILKHFSFLEGAAYGKKLFESKSSGNKSSKNKELTKKEKEELQANALSLDNLKSILFDFLQKLKDFRNYYSHYRHSGSSELPLFDGNMLQRLYNVFDVSVQRVKRDHEHNDKVDPHRHFNHLVRKGKKDRYGHNDNPSFKHHFVDGEGMVTEAGLLFFVSLFLEKRDAIWMQKKIRGFKGGTETYQQMTNEVFCRSRISLPKLKLESLRTDDWMLLDMLNELVRCPKPLYDRLREKDRARFRVPVDILPDEDDTDGGGEDPFKNTLVRHQDRFPYFALRYFDLKKVFTSLRFHIDLGTYHFAIYKKVIGEQPEDRHLTRNLYGFGRIQDFAEEHRPEEWKRLVRDLDYFETGDKPYISQTTPHYHIEKGKIGLRFVPEGQHLWPSPEVGTTRTGRSKYAQDKRLTAEAFLSVHELMPMMFYYFLLREKYSEEVSAEKVQGRIKRVIEDVYAIYDAFARDEINTRDELDACLADKGIRRGHLPKQMIGILSQEHKNMEEKVRKKLQEMIADTDHRLDMLDRQTDRKIRIGRKNAGLPKSGVIADWLVRDMMRFQPVAKDTSGKPLNNSKANSTEYRMLQRALALFGGEKERLTPYFRQMNLTGGNNPHPFLDETRWESHTNILSFYRSYLRARKAFLERIGRSDRVENRPFLLLKEPKTDRQTLVAGWKSEFHLPRGIFTEAVRDCLIEMGYDEVGSYKEVGFMAKAVPLYFERACKDRVQPFYDSPFNVGNSLKPKKGRFLSKEKRAEEWESGKERFRLAKLKKEILEAQEHPYHDFKSWQKFERELRLVKNQDIITWMMCRDLMEENKVEGLDTGTLYLKDIRPNVQEQGSLNVLNRVKPMRLPVVVYRADSRGHVHKEEAPLATVYIEERDTKLLKQGNFKSFVKDRRLNGLFSFVDTGGLAMEQYPISKLRVEYELAKYQTARVCVFELTLRLEESLLSRYPHLPDESFREMLESWSDPLLAKWPELHGKVRLLIAVRNAFSHNQYPMYDEAVFSSIRKYDPSSPDAIEERMGLNIAHRLSEEVKQAKETVERIIQA

SEQ ID NO: 131 - protein, 1119 aa, Porphyromonas gulae
MTEQSERPYNGTYYTLEDKHFWAAFLNLARHNAYITLTHIDRQLAYSKADITNDQDVLSFKALWKNFDNDLERKSRLRSLILKHFSFLEGAAYGKKLFESKSSGNKSSKNKELTKKEKEELQANALSLDNLKSILFDFLQKLKDFRNYYSHYRHSGSSELPLFDGNMLQRLYNVFDVSVQRVKRDHEHNDKVDPHYHFNHLVRKGKKDRYGHNDNPSFKHHFVDSEGMVTEAGLLFFVSLFLEKRDAIWMQKKIRGFKGGTGPYEQMTNEVFCRSRISLPKLKLESLRTDDWMLLDMLNELVRCPKPLYDRLREKDRACFRVPVDILPDEDDTDGGGEDPFKNTLVRHQDRFPYFALRYFDLKKVFTSLRFHIDLGTYHFAIYKKMIGEQPEDRHLTRNLYGFGRIQDFAEEHRPEEWKRLVRDLDYFETGDKPYISQTTPHYHIEKGKIGLRFMPEGQHLWPSPEVGTTRTGRSKYAQDKRLTAEAFLSVHELMPMMFYYFLLREKYSEEVSAEKVQGRIKRVIKDVYAIYDAFARDEINTLKELDACSADKGIRRGHLPKQMIGILSQEHKNMEEKVRKKLQEMIADTDHRLDMLDRQTDRKIRIGRKNAGLPKSGVIADWLVRDMMRFQPVAKDTSGKPLNNSKANSTEYRMLQRALALFGGEKERLTPYFRQMNLTGGNNPHPFLDETRWESHTNILSFYRSYLRARKAFLERIGRSDRVENRPFLLLKEPKNDRQTLVAGWKSEFHLPRGIFTEAVRDCLIEMGYDEVGSYKEVGFMAKAVPLYFERACKDRVQPFYDSPFNVGNSLKPKKGRFLSKEKRAEEWESGKERFRLAKLKKEILEAKEHPYHDFKSWQKFERELRLVKNQDIITWMMCRDLMEENKVEGLDTGTLYLKDIRTDVHEQGSLNVLNRVKPMRLPVVVYRADSRGHVHKEQAPLATVYIEERDTKLLKQGNFKSFVKDRRLNGLFSFVDTGGLAMEQYPISKLRVEYELAKYQTARVCAFEQTLELEESLLTRYPHLPDENFREMLESWSDPLLGKWPDLHGKVRLLIAVRNAFSHNQYPMYDEAVFSSIRKYDPSSPDAIEERMGLNIAHRLSEEVKQAKETVERIIQA

SEQ ID NO: 132 - protein, 1175 aa, Porphyromonas gulae
MTEQSERPYNGTYYTLEDKHFWAAFLNLARHNAYITLTHIDRQLAYSKADITNDQDVLSFKALWKNFDNDLERKSRLRSLILKHFSFLEGAAYGKKLFESKSSGNKSSKNKELTKKEKEELQANALSLDNLKSILFDFLQKLKDFRNYYSHYRHSESSELPLFDGNMLQRLYNVFDVSVQRVKRDHEHNDKVDPHRHFNHLVRKGKKDRYGHNDNPSFKHHFVDGEGMVTEAGLLFFVSLFLEKRDAIWMQKKIRGFKGGTETYQQMTNEVFCRSRISLPKLKLESLRTDDWMLLDMLNELVRCPKPLYDRLREDDRACFRVPVDILPDEDDTDGGGEDPFKNTLVRHQDRFPYFALRYFDLKKVFTSLRFHIDLGTYHFAIYKKMIGEQPEDRHLTRNLYGFGRIQDFAEEHRPEEWKRLVRDLDYFETGDKPYISQTSPHYHIEKGKIGLRFMPEGQHLWPSPEVGTTRTGRSKYAQDKRLTAEAFLSVHELMPMMFYYFLLREKYSEEVSAEKVQGRIKRVIEDVYAIYDAFARDEINTLKELDACLADKGIRRGHLPKQMIAILSQEHKDMEEKIRKKLQEMIADTDHRLDMLDRQTDRKIRIGRKNAGLPKSGVIADWLVRDMMRFQPVAKDTSGKPLNNSKANSTEYRMLQRALALFGGEKKRLTPYFRQMNLTGGNNPHPFLHETRWESHTNILSFYRSYLRARKAFLERIGRSDRMENRPFLLLKEPKTDRQTLVAGWKSEFHLPRGIFTEAVRDCLIEMGYDEVGSYREVGFMAKAVPLYFERACEDRVQPFYDSPFNVGNSLKPKKGRFLSKEERAEEWERGKERFRDLEAWSHSAARRIEDAFAGIEYASPGNKKKIEQLLRDLSLWEAFESKLKVRADKINLAKLKKEILEAQEHPYHDFKSWQKFERELRLVKNQDIITWMMCRDLMEENKVEGLDTGTLYLKDIRPNVQEQGSLNVLNRVKPMRLPVVVYRADSRGHVHKEEAPLATVYIEERDTKLLKQGNFKSFVKDRRLNGLFSFVDTGGLAMEQYPISKLRVEYELAKYQTARVCVFELTLRLEESLLTRYPHLPDESFRKMLESWSDPLLAKWPELHGKVRLLIAVRNAFSHNQYPMYDEAVFSSIRKYDPSSPDAIEERMGLNIAHRLSEEVKQAKETVERIIQV

SEQ ID NO: 133 - protein, 1119 aa, Porphyromonas gulae
MTEQSERPYNGTYYTLEDKHFWAAFLNLARHNAYITLTHIDRQLAYSKADITNDEDILFFKGQWKNLDNDLERKSRLRSLILKHFSFLEGAAYGKKFFESKSSGNKSSKNKELTKKEKEELQANALSLDNLKSILFDFLQKLKDFRNYYSHYRHSGSSELPLFDGNMLQRLYNVFDVSVQRVKRDHEHNDEVDPHYHFNHLVRKGKKDRYGHNDNPSFKHHFVDGEGMVTEAGLLFFVSLFLEKRDAIWMQKKIRGFKGGTEPYEQMTNEVFCRSRISLPKLKLESLRTDDWMLLDMLNELVRCPKPLYDRLREKDRACFRVPVDILPDEDDTDGGGEDPFKNTLVRHQDRFPYFALRYFDLKKVFTSLRFHIDLGTYHFAIYKKMIGEQPEDRHLTRNLYGFGRIQDFAEEHRPEEWKRLVRDLDYFETGDKPYISQTTPHYHIEKGKIGLRFVPEGQHLWPSPEVGTTRTGRSKYAQDKRLTAEAFLSVHELMPMMFYYFLLREKYSEEVSAEKVQGRIKRVIEDVYAIYDAFARDEINTLKELDACLADKGIRRGHLPKQMIGILSQERKDMEEKVRKKLQEMIADTDHRLDMLDRQTDRKIRIGRKNAGLPKSGVIADWLVRDMMRFQPVAKDTSGKPLNNSKANSTEYRMLQRALALFGGEKERLTPYFRQMNLTGGNNPHPFLHETRWESHTNILSFYRSYLRARKAFLERIGRSDRVENCPFLLLKEPKTDRQTLVAGWKGEFHLPRGIFTEAVRDCLIEMGYDEVGSYREVGFMAKAVPLYFERACEDRVQPFYDSPFNVGNSLKPKKGRFLSKEKRAEEWESGKERFRLAKLKKEILEAQEHPYHDFKSWQKFERELRLVKNQDIITWMMCRDLMEENKVEGLDTGTLYLKDIRPNVQEQGSLNVLNRVKPMRLPVVVYRADSRGHVHKEEAPLATVYIEERDTKLLKQGNFKSFVKDRRLNGLFSFVDTGALAMEQYPISKLRVEYELAKYQTARVCAFEQTLELEESLLTRYPHLPDESFREMLESWSDPLLTKWPELHGKVRLLIAVRNAFSHNQYPMYDEAVFSSIWKYDPSSPDAIEERMGLNIAHRLSEEVKQAKETIERIIQA

SEQ ID NO: 134 - protein, 1174 aa, Porphyromonas gulae
MTEQSERPYNGTYYTLEDKHFWAAFLNLARHNAYITLTHIDRQLAYSKADITNDQDVLSFKALWKNLDNDLERKSRLRSLILKHFSFLEGAAYGKKLFESKSSGNKSSKNKELTKKEKEELQANALSLDNLKSILFDFLQKLKDFRNYYSHYRHSGSSELPLFDGNMLQRLYNVFDVSVQRVKRDHEHNDKVDPHYHFNHLVRKGKKDRYGHNDNPSFKHHFVDSEGMVTEAGLLFFVSLFLEKRDAIWMQKKIRGFKGGTGPYEQMTNEVFCRSRISLPKLKLESLRTDDWMLLDMLNELVRCPKPLYDRLREKDRACFRVPVDILPDEDDTDGGGEDPFKNTLVRHQDRFPYFALRYFDLKKVFTSLRFHIDLGTYHFAIYKKMIGEQPEDRHLTRNLYGFGRIQDFAEEHRPEEWKRLVRDLDYLETGDKPYISQTTPHYHIEKGKIGLRFVPEGQHLWPSPEVGTTRTGRSKCAQDKRLTAEAFLSVHELMPMMFYYFLLREKYSEEVSAEKVQGRIKRVIEDVYAIYDAFARDEINTLKELDTCLADKGIRRGHLPKQMITILSQERKDMKEKIRKKLQEMIADTDHRLDMLDRQTDRKIRIGRKNAGLPKSGVIADWLVRDMMRFQPVAKDASGKPLNNSKANSTEYRMLQRALALFGGEKERLTPYFRQMNLTGGNNPHPFLHETRWESHTNILSFYRSYLRARKAFLERIGRSDRVENCPFLLLKEPKTDRQTLVAGWKDEFHLPRGIFTEAVRDCLIEMGYDEVGSYREVGFMAKAVPLYFERACEDRVQPFYDSPFNVGNSLKPKKGRFLSKEDRAEEWERGMERFRDLEAWSHSAARRIKDAFAGIEYASPGNKKKIEQLLRDLSLWEAFESKLKVRADKINLAKLKKEILEAQEHPYHDFKSWQKFERELRLVKNQDIITWMMCRDLMEENKVEGLDTGTLYLKDIRPNVQEQGSLNVLNRVKPMRLPVVVYRADSRGHVHKEAPLATVYIEERNTKLLKQGNFKSFVKDRRLNGLFSFVDTGGLAMEQYPISKLRVEYELAKYQTARVCVFELTLRLEESLLSRYPHLPDESFREMLESWSDPLLAKWPELHGKVRLLIAVRNAFSHNQYPMYDEAVFSSIRKYDPSSPDAIEERMGLNIAHRLSEEVKQAKETVERIIQA

SEQ ID NO: 135 - protein, 1135 aa, Porphyromonas gulae
MNTVPATENKGQSRTVEDDPQYFGLYLNLARENLIEVESHVRIKFGKKKLNEESLKQSLLCDHLLSIDRWTKVYGHSRRYLPFLHCFDPDSGIEKDHDSKTGVDPDSAQRLIRELYSLLDFLRNDFSHNRLDGTTFEHLKVSPDISSFITGAYTFACERAQSRFADFFKPDDFLLAKNRKEQLISVADGKECLTVSGFAFFICLFLDREQASGMLSRIRGFKRTDENWARAVHETFCDLCIRHPHDRLESSNTKEALLLDMLNELNRCPRILYDMLPEEERAQFLPALDENSMNNLSENSLNEESRLLWDGSSDWAEALTKRIRHQDRFPYLMLRFIEEMDLLKGIRFRVDLGEIELDSYSKKVGRNGEYDRTITDHALAFGKLSDFQNEEEVSRMISGEASYPVRFSLFAPRYAIYDNKIGYCHTSDPVYPKSKTGEKRALSNPQSMGFISVHDLRKLLLMELLCEGSFSRMQSDFLRKANRILDETAEGKLQFSALFPEMRHRFIPPQNPKSKDRREKAETTLEKYKQEIKGRKDKLNSQLLSAFDMNQRQLPSRLLDEWMNIRPASHSVKLRTYVKQLNEDCRLRLRKFRKDGDGKARAIPLVGEMATFLSQDIVRMIISEETKKLITSAYYNEMQRSLAQYAGEENRRQFRAIVAELHLLDPSSGHPFLSATMETAHRYTEDFYKCYLEKKREWLAKTFYRPEQDENTKRRISVFFVPDGEARKLLPLLIRRRMKEQNDLQDWIRNKQAHPIDLPSHLFDSKIMELLKVKDGKKKWNEAFKDWWSTKYPDGMQPFYGLRRELNIHGKSVSYIPSDGKKFADCYTHLMEKTVRDKKRELRTAGKPVPPDLAAYIKRSFHRAVNEREFMLRLVQEDDRLMLMAINKMMTDREEDILPGLKNIDSILDEENQFSLAVHAKVLEKEGEGGDNSLSLVPATIEIKSKRKDWSKYIRYRYDRRVPGLMSHFPEHKATLDEVKTLLGEYDRCRIKIFDWAFALEGAIMSDRDLKPYLHESSSREGKSGEHSTLVKMLVEKKGCLTPDESQYLILIRNKAAHNQFPCAAEMPLIYRDVSAKVGSIEGSSAKDLPEGSSLVDSLWKKYEMIIRKILPILDHENRFFGKLLNNMSQPINDL

SEQ ID NO: 136 - protein, 1218 aa, Capnocytophaga cynodegmi
MENKTSLGNNIYYNPFKPQDKSYFAGYLNAAMENIDSVFRELGKRLKGKEYTSENFFDAIFKENISLVEYERYVKLLSDYFPMARLLDKKEVPIKERKENFKKNFRGIIKAVRDLRNFYTHKEHGEVEITDEIFGVLDEMLKSTVLTVKKKKIKTDKTKEILKKSIEKQLDILCQKKLEYLKDTARKIEEKRRNQRERGEKKLVPRFEYSDRRDDLIAAIYNDAFDVYIDKKKDSLKESSKTKYNTESYPQQEEGDLKIPISKNGVVFLLSLFLSKQEVHAFKSKIAGFKATVIDEATVSHRKNSICFMATHEIFSHLAYKKLKRKVRTAEINYSEAENAEQLSIYAKETLMMQMLDELSKVPDVVYQNLSEDVQKTFIEDWNEYLKENNGDVGTMEEEQVIHPVIRKRYEDKFNYFAIRFLDEFAQFPTLRFQVHLGNYLHDSRPKEHLISDRRIKEKITVFGRLSELEHKKALFIKNTETNEDRKHYWEVFPNPNYDFPKENISVNDKDFPIAGSILDREKQPTAGKIGIKVNLLNQKYISEVDKAVKAHQLKQRNNKPSIQNIIEEIVPINGSNPKEIIVFGGQPTAYLSMNDIHSILYEFFDKWEKKKEKLEKKGEKELRKEIGKELEEKIVGKIQTQIQQIIDKDINAKILKPYQDDDSTAIDKEKLIKDLKQEQKILQKLKNEQTAREKEYQECIAYQEESRKIKRSDKSRQKYLRNQLKRKYPEVPTRKEILYYQEKGKVAVWLANDIKRFMPTDFKNEWKGEQHSLLQKSLAYYEQCKEELKNLLPQQKVFKHLPFELGGHFQQKYLYQFYTRYLDKRLEHISGLVQQAENFKNENKVFKKVENECFKFLKKQNYTHKGLDAQAQSVLGYPIFLERGFMDEKPTIIKGKTFKGNESLFTDWFRYYKEYQNFQTFYDTENYPLVELEKKQADRKRETKIYQQKKNDVFTLLMAKHIFKSVFKQDSIDRFSLEDLYQSREERLENQEKAKQTGERNTNYIWNKTVDLNLCDGKVTVENVKLKNVGNFIKYEYDQRVQTFLKYEENIKWQAFLIKESKEEENYPYIVEREIEQYEKVRREELLKEVHLIEEYILEKVKDKEILKKGDNQNFKYYILNGLLKQLKNEDVESYKVFNLNTKPEDVNINQLKQEATDLEQKAFVLTYIRNKFAHNQLPKKEFWDYCQEKYGKIEKEKTYAEYFAEVFKREKEALMK

SEQ ID NO: 137 - protein, 1090 aa, Prevotella sp.
MNIPALVENQKKYFGTYSVMAMLNAQTVLDHIQKVADIEGEQNENNENLWFHPVMSHLYNAKNGYDKQPEKTMFIIERLQSYFPFLKIMAENQREYSNGKYKQNRVEVNSNDIFEVLKRAFGVLKMYRDLTNHYKTYEEKLIDGCEFLTSTEQPLSGMISKYYTVALRNTKERYGYKTEDLAFIQDNIKKITKDAYGKRKSQVNTGFFLSLQDYNGDTQKKLHLSGVGIALLICLFLDKQYINIFLSRLPIFSSYNAQSEERRIIIRSFGINSIKLPKDRIHSEKSNKSVAMDMLNEVKRCPDELFTTLSAEKQSRFRIISDDHNEVLMKRSTDRFVPLLLQYIDYGKLFDHIRFHVNMGKLRYLLKADKTCIDGQTRVRVIEQPLNGFGRLEEAETMRKQENGTFGNSGIRIRDFENVKRDDANPANYPYIVDTYTHYILENNKVEMFISDKGSSAPLLPLIEDDRYVVKTIPSCRMSTLEIPAMAFHMFLFGSKKTEKLIVDVHNRYKRLFQAMQKEEVTAENIASFGIAESDLPQKILDLISGNAHGKDVDAFIRLTVDDMLTDTERRIKRFKDDRKSIRSADNKMGKRGFKQISTGKLADFLAKDIVLFQPSVNDGENKITGLNYRIMQSAIAVYDSGDDYEAKQQFKLMFEKARLIGKGTTEPHPFLYKVFARSIPANAVDFYERYLIERKFYLTGLCNEIKRGNRVDVPFIRRDQNKWKTPAMKTLGRIYSEDLPVELPRQMFDNEIKSHLKSLPQMEGIDFNNANVTYLIAEYMKRVLNDDFQTFYQWKRNYHYMDMLKGEYDRKGSLQHCFTSVEEREGLWKERASRTERYRKLASNKIRSNRQMRNASSEEIETILDKRLSNCRNEYQKSEKVIRRYRVQDALLFLLAKKTLTELADFDGERFKLKEIMPDAEKGILSEIMPMSFTFEKGGKKYTITSEGMKLKNYGDFFVLASDKRIGNLLELVGSDIVSKEDIMEEFNKYDQCRPEISSIVFNLEKWAFDTYPELSARVDREEKVDFKSILKILLNNKNINKEQSDILRKIRNAFDHNNYPDKGIVEIKALPEIAMSIKKAFGEYAIMK

SEQ ID NO: 138 - protein, 1090 aa, Prevotella sp.
MNIPALVENQKKYFGTYSVMAMLNAQTVLDHIQKVADIEGEQNENNENLWFHPVMSHLYNAKNGYDKQPEKTMFIIERLQSYFPFLKIMAENQREYSNGKYKQNRVEVNSNDIFEVLKRAFGVLKMYRDQASHYKTYDEKLIDGCEFLTSTEQPLSGMINNYYTVALRNMNERYGYKTEDLAFIQDKRFKFVKDAYGKKKSQVNTGFFLSLQDYNGDTQKKLHLSGVGIALLICLFLDKQYINIFLSRLPIFSSYNAQSEERRIIIRSFGINSIKQPKDRIHSEKSNKSVAMDMLNEIKRCPNELFETLSAEKQSRFRIISNDHNEVLMKRSSDRFVPLLLQYIDYGKLFDHIRFHVNMGKLRYLLKADKTCIDGQTRVRVIEQPLNGFGRLEEVETMRKQENGTFGNSGIRIRDFENMKRDDANPANYPYIVDTYTHYILENNKVEMFISDEETPAPLLPVIEDDRYVVKTIPSCRMSTLEIPAMAFHMFLFGSKKTEKLIVDVHNRYKRLFKAMQKEEVTAENIASFGIAESDLPQKIIDLISGNAHGKDVDAFIRLTVDDMLADTERRIKRFKDDRKSIRSADNKMGKRGFKQISTGKLADFLAKDIVLFQPSVNDGENKITGLNYRIMQSAIAVYNSGDDYEAKQQFKLMFEKARLIGKGTTEPHPFLYKVFVRSIPANAVDFYERYLIERKFYLIGLSNEIKKGNRVDVPFIRRDQNKWKTPAMKTLGRIYDEDLPVELPRQMFDNEIKSHLKSLPQMEGIDFNNANVTYLIAEYMKRVLNDDFQTFYQWKRNYRYMDMLRGEYDRKGSLQSCFTSVEEREGLWKERASRTERYRKLASNKIRSNRQMRNASSEEIETILDKRLSNSRNEYQKSEKVIRRYRVQDALLFLLAKKTLTELADFDGERFKLKEIMPDAEKGILSEIMPMSFTFEKGGKKYTITSEGMKLKNYGDFFVLASDKRIGNLLELVGSDTVSKEDIMEEFKKYDQCRPEISSIVFNLEKWAFDTYPELSARVDREEKVDFKSILKILLNNKNINKEQSDILRKIRNAFDHNNYPDKGVVEIRALPEIAMSIKKAFGEYAIMK

SEQ ID NO: 139 - protein, 1090 aa, Prevotella sp.
MNIPALVENQKKYFGTYSVMAMLNAQTVLDHIQKVADIEGEQNENNENLWFHPVMSHLYNAKNGYDKQPEKTMFIIERLQSYFPFLKIMAENQREYSNGKYKQNRVEVNSNDIFEVLKRAFGVLKMYRDLTNHYKTYEEKLIDGCEFLTSTEQPFSGMISKYYTVALRNTKERYGYKAEDLAFIQDNRYKFTKDAYGKRKSQVNTGSFLSLQDYNGDTTKKLHLSGVGIALLICLFLDKQYINLFLSRLPIFSSYNAQSEERRIIIRSFGINSIKQPKDRIHSEKSNKSVAMDMLNEVKRCPDELFTTLSAEKQSRFRIISDDHNEVLMKRSSDRFVPLLLQYIDYGKLFDHIRFHVNMGKLRYLLKADKTCIDGQTRVRVIEQPLNGFGRLEEVETMRKQENGTFGNSGIRIRDFENMKRDDANPANYPYIVETYTHYILENNKVEMFISDEENPTPLLPVIEDDRYVVKTIPSCRMSTLEIPAMAFHMFLFGSEKTEKLIIDVHDRYKRLFQAMQKEEVTAENIASFGIAESDLPQKIMDLISGNAHGKDVDAFIRLTVDDMLTDTERRIKRFKDDRKSIRSADNKMGKRGFKQISTGKLADFLAKDIVLFQPSVNDGENKITGLNYRIMQSAIAVYDSGDDYEAKQQFKLMFEKARLIGKGTTEPHPFLYKVFVRSIPANAVDFYERYLIERKFYLIGLSNEIKKGNRVDVPFIRRDQNKWKTPAMKTLGRIYSEDLPVELPRQMFDNEIKSHLKSLPQMEGIDFNNANVTYLIAEYMKRVLNDDFQTFYQWKRNYRYMDMLRGEYDRKGSLQHCFTSIEEREGLWKERASRTERYRKLASNKIRSNRQMRNASSEEIETILDKRLSNCRNEYQKSEKIIRRYRVQDALLFLLAKKTLTELADFDGERFKLKEIMPDAEKGILSEIMPMSFTFEKGGKIYTITSGGMKLKNYGDFFVLASDKRIGNLLELVGSNTVSKEDIMEEFKKYDQCRPEISSIVFNLEKWAFDTYPELPARVDRKEKVDFWSILDVLSNNKDINNEQSYILRKIRNAFDHNNYPDKGIVEIKALPEIAMSIKKAFGEYAIMK

SEQ ID NO: 140 - protein, 1131 aa, Phaeodactylibacter xiamenensis
MTNTPKRRTLHRHPSYFGAFLNIARHNAFMIMEHLSTKYDMEDKNTLDEAQLPNAKLFGCLKKRYGKPDVTEGVSRDLRRYFPFLNYPLFLHLEKQQNAEQAATYDINPEDIEFTLKGFFRLLNQMRNNYSHYISNTDYGKFDKLPVQDIYEAAIFRLLDRGKHTKRFDVFESKHTRHLESNNSEYRPRSLANSPDHENTVAFVTCLFLERKYAFPFLSRLDCFRSTNDAAEGDPLIRKASHECYTMFCCRLPQPKLESSDILLDMVNELGRCPSALYNLLSEEDQARFHIKREEITGFEEDPDEELEQEIVLKRHSDRFPYFALRYFDDTEAFQTLRFDVYLGRWRTKPVYKKRIYGQERDRVLTQSIRTFTRLSRLLPIYENVKHDAVRQNEEDGKLVNPDVTSQFHKSWIQIESDDRAFLSDRIEHFSPHYNFGDQVIGLKFINPDRYAAIQNVFPKLPGEEKKDKDAKLVNETADAIISTHEIRSLFLYHYLSKKPISAGDERRFIQVDTETFIKQYIDTIKLFFEDIKSGELQPIADPPNYQKNEPLPYVRGDKEKTQEERAQYRERQKEIKERRKELNTLLQNRYGLSIQYIPSRLREYLLGYKKVPYEKLALQKLRAQRKEVKKRIKDIEKMRTPRVGEQATWLAEDIVFLTPPKMHTPERKTTKHPQKLNNDQFRIMQSSLAYFSVNKKAIKKFFQKETGIGLSNRETSHPFLYRIDVGRCRGILDFYTGYLKYKMDWLDDAIKKVDNRKHGKKEAKKYEKYLPSSIQHKTPLELDYTRLPVYLPRGLFKKAIVKALAAHADFQVEPEEDNVIFCLDQLLDGDTQDFYNWQRYYRSALTEKETDNQLVLAHPYAEQILGTIKTLEGKQKNNKLGNKAKQKIKDELIDLKRAKRRLLDREQYLRAVQAEDRALWLMIQERQKQKAEHEEIAFDQLDLKNITKILTESIDARLRIPDTKVDITDKLPLRRYGDLRRVAKDRRLVNLASYYHVAGLSEIPYDLVKKELEEYDRRRVAFFEHVYQFEKEVYDRYAAELRNENPKGESTYFSHWEYVAVAVKHSADTHFNELFKEKVMQLRNKFHHNEFPYFDWLLPEVEKASAALYADRVFDVAEGYYQKMRKLMRQ

SEQ ID NO: 141 - protein, 1155 aa, Flavorbacterium sp.
MDNNITVEKTELGLGITYNHDKVEDKHYFGGFFNLAQNNIDLVAQEFKKRLLIQGKDSINIFANYFSDQCSITNLERGIKILAEYFPVVSYIDLDEKNKSKSIREHLILLLETINNLRNYYTHYYHKKIIIDGSLFPLLDTILLKVVLEIKKKKLKEDKTKQLLKKGLEKEMTILFNLMKAEQKEKKIKGWNIDENIKGAVLNRAFSHLLYNDELSDYRKSKYNTEDETLKDTLTESGILFLLSFFLNKKEQEQLKANIKGYKGKIASIPDEEITLKNNSLRNMATHWTYSHLTYKGLKHRIKTDHEKETLLVNMVDYLSKVPHEIYQNLSEQNKSLFLEDINEYMRDNEENHDSSEASRVIHPVIRKRYENKFAYFAIRFLDEFAEFPTLRFMVNVGNYIHDNRKKDIGGTSLITNRTIKQQINVFGNLTEIHKKKNDYFEKEENKEKTLEWELFPNPSYHFQKENIPIFIDLEKSKETNDLAKEYAKEKKKIFGSSRKKQQNTAKKNRETIINLVFDKYKTSDRKTVTFEQPTALLSFNELNSFLYAFLVENKTGKELEKIIIEKIANQYQILKNCSSTVDKTNDNIPKSIKKIVNTTTDSFYFEGKKIDIEKLEKDITIEIEKTNEKLETIKENEESAQNYKRNERNTQKRKLYRKYVFFTNEIGIEATWITNDILRFLDNKENWKGYQHSELQKFISQYDNYKKEALGLLESEWNLESDAFFGQNLKRMFQSNSTFETFYKKYLDNRKNTLETYLSAIENLKTMTDVRPKVLKKKWTELFRFFDKKIYLLSTIETKINELITKPINLSRGIFEEKPTFINGKNPNKENNQHLFANWFIYAKKQTILQDFYNLPLEQPKAITNLKKHKYKLERSINNLKIEDIYIKQMVDFLYQKLFEQSFIGSLQDLYTSKEKREIEKGKAKNEQTPDESFIWKKQVEINTHNGRIIAKTKIKDIGKFKNLLTDNKIAHLISYDDRIWDFSLNNDGDITKKLYSINTELESYETIRREKLLKQIQQFEQFLLEQETEYSAERKHPEKFEKDCNPNFKKYIIEGVLNKIIPNHEIEEIEILKSKEDVFKINFSDILILNNDNIKKGYLLIMIRNKFAHNQLIDKNLFNFSLQLYSKNENENFSEYLNKVCQNIIQEFKEKLK

SEQ ID NO: 142 - protein, 1175 aa, Porphyromonas gulae
MTEQSERPYNGTYYTLEDKHFWAAFLNLARHNAYITLTHIDRQLAYSKADITNDQDVLSFKALWKNFDNDLERKSRLRSLILKHFSFLEGAAYGKKLFESKSSGNKSSKNKELTKKEKEELQANALSLDNLKSILFDFLQKLKDFRNYYSHYRHSESSELPLFDGNMLQRLYNVFDVSVQRVKRDHEHNDKVDPHRHFNHLVRKGKKDRYGHNDNPSFKHHFVDSEGMVTEAGLLFFVSLFLEKRDAIWMQKKIRGFKGGTETYQQMTNEVFCRSRISLPKLKLESLRTDDWMLLDMLNELVRCPKPLYDRLREKDRARFRVPVDILPDEDDTDGGGEDPFKNTLVRHQDRFPYFALRYFDLKKVFTSLRFHIDLGTYHFAIYKKMIGEQPEDRHLTRNLYGFGRIQDFAEEHRPEEWKRLVRDLDYFETGDKPYISQTTPHYHIEKGKIGLRFMPEGQHLWPSPEVGTTRTGRSKYAQDKRLTAEAFLSVHELMPMMFYYFLLREKYSEEVSAEKVQGRIKRVIEDVYAIYDAFARDEINTLKELDACLADKGIRRGHLPKQMIAILSQEHKDMEEKIRKKLQEMIADTDHRLDMLDRQTDRKIRIGRKNAGLPKSGVIADWLVRDMMRFQPVAKDTSGKPLNNSKANSTEYRMLQRALALFGGEKKRLTPYFRQMNLTGGNNPHPFLHETRWESHTNILSFYRSYLRARKAFLERIGRSDRMENRPFLLLKEPKTDRQTLVAGWKSEFHLPRGIFTEAVRDCLIEMGYDEVGSYREVGFMAKAVPLYFERACEDRVQPFYDSPFNVGNSLKPKKGRFLSKEERAEEWERGKERFRDLEAWSHSAARRIEDAFAGIEYASPGNKKKIEQLLRDLSLWEAFESKLKVRADKINLAKLKKEILEAQEHPYHDFKSWQKFERELRLVKNQDIITWMMCRDLMEENKVEGLDTGTLYLKDIRPNVQEQGSLNVLNRVKPMRLPVVVYRADSRGHVHKEEAPLATVYIEERDTKLLKQGNFKSFVKDRRLNGLFSFVDTGGLAMEQYPISKLRVEYELAKYQTARVCVFELTLRLEESLLTRYPHLPDESFRKMLESWSDPLLAKWPELHGKVRLLIAVRNAFSHNQYPMYDEAVFSSIRKYDPSSPDAIEERMGLNIAHRLSEEVKQAKETVERIIQV

SEQ ID NO: 143 - protein, 1145 aa, Chryseobacterium sp.
METQTIGHGIAYDHSKIQDKHFFGGFLNLAENNIKAVLKAFSEKFNVGNVDVKQFADVSLKDNLPDNDFQKRVSFLKMYFPVVDFINIPNNRAKFRSDLTTLFKSVDQLRNFYTHYYHKPLDFDASLFILLDDIFARTAKEVRDQKMKDDKTRQLLSKSLSEELQKGYELQLERLKELNRLGKKVNIHDQLGIKNGVLNNAFNHLIYKDGESFKTKLTYSSALTSFESAENGIEISQSGLLFLLSMFLKRKEIEDLKNRNKGFKAKVVIDEDGKVNGLKFMATHWVFSYLCFKGLKSKLSTEFHEETLLIQIIDELSKVPDELYCAFDKETRDKFIEDINEYVKEGHQDFSLEDAKVIHPVIRKRYENKFNYFAIRFLDEFVKFPSLRFQVHVGNYVHDRRIKNIDGTTFETERVVKDRIKVFGRLSEISSYKAQYLSSVSDKHDETGWEIFPNPSYVFINNNIPIHISVDTSFKKEIADFKKLRRAQVPDELKIRGAEKKRKFEITQMIGSKSVLNQEEPIALLSLNEIPALLYEILINGKEPAEIERIIKDKLNERQDVIKNYNPENWLPASQISRRLRSNKGERIINTDKLLQLVTKELLVTEQKLKIISDNREALKQKKEGKYIRKFIFTNSELGREAIWLADDIKRFMPADVRKEWKGYQHSQLQQSLAFYNSRPKEALAILESSWNLKDEKIIWNEWILKSFTQNKFFDAFYNEYLKGRKKYFAFLSEHIVQYTSNAKNLQKFIKQQMPKDLFEKRHYIIEDLQTEKNKILSKPFIFPRGIFDKKPTFIKGVKVEDSPESFANWYQYGYQKDHQFQKFYDWKRDYSDVFLEHLGKPFINNGDRRTLGMEELKERIIIKQDLKIKKIKIQDLFLRLIAENLFQKVFKYSAKLPLSDFYLTQEERMEKENMAALQNVREEGDKSPNIIKDNFIWSKMIPYKKGQIIENAVKLKDIGKLNVLSLDDKVQTLLSYDDAKPWSKIALENEFSIGENSYEVIRREKLFKEIQQFESEILFRSGWDGINHPAQLEDNRNPKFKMYIVNGILRKSAGLYSQGEDIWFEYNADFNNLDADVLETKSELVQLAFLVTAIRNKFAHNQLPAKEFYFYIRAKYGFADEPSVALVYLNFTKYAINEFKKVMI

SEQ ID NO: 144 - protein, 948 aa, Riemerella anatipestifer
MFFSFHNAQRVIFKHLYKAFDASLRMVKEDYKAHFTVNLTRDFAHLNRKGKNKQDNPDFNRYRFEKDGFFTESGLLFFTNLFLDKRDAYWMLKKVSGFKASHKQREKMTTEVFCRSRILLPKLRLESRYDHNQMLLDMLSELSRCPKLLYEKLSEENKKHFQVEADGFLDEIEEEQNPFKDTLIRHQDRFPYFALRYLDLNESFKSIRFQVDLGTYHYCIYDKKIGDEQEKRHLTRTLLSFGRLQDFTEINRPQEWKALTKDLDYKETSNQPFISKTTPHYHITDNKIGFRLGTSKELYPSLEIKDGANRIAKYPYNSGFVAHAFISVHELLPLMFYQHLTGKSEDLLKETVRHIQRIYKDFEEERINTIEDLEKANQGRLPLGAFPKQMLGLLQNKQPDLSEKAKIKIEKLIAETKLLSHRLNTKLKSSPKLGKRREKLIKTGVLADWLVKDFMRFQPVAYDAQNQPIKSSKANSTEFWFIRRALALYGGEKNRLEGYFKQTNLIGNTNPHPFLNKFNWKACRNLVDFYQQYLEQREKFLEAIKNQPWEPYQYCLLLKIPKENRKNLVKGWEQGGISLPRGLFTEAIRETLSEDLMLSKPIRKEIKKHGRVGFISRAITLYFKEKYQDKHQSFYNLSYKLEAKAPLLKREEHYEYWQQNKPQSPTESQRLELHTSDRWKDYLLYKRWQHLEKKLRLYRNQDVMLWLMTLELTKNHFKELNLNYHQLKLENLAVNVQEADAKLNPLNQTLPMVLPVKVYPATAFGEVQYHKTPIRTVYIREEHTKALKMGNFKALVKDRRLNGLFSFIKEENDTQKHPISQLRLRRELEIYQSLRVDAFKETLSLEEKLLNKHTSLSSLENEFRALLEEWKKEYAASSMVTDEHIAFIASVRNAFCHNQYPFYKEALHAPIPLFTVAQPTTEEKDGLGIAEALLKVLREYCEIVKSQI

SEQ ID NO: 145 - protein, 1175 aa, Porhyromonas gingivalis
MTEQNEKPYNGTYYTLEDKHFWAAFFNLARHNAYITLAHIDRQLAYSKADITNDEDILFFKGQWKNLDNDLERKARLRSLILKHFSFLEGAAYGKKLFESQSSGNKSSKKKELTKKEKEELQANALSLDNLKSILFDFLQKLKDFRNYYSHYRHPESSELPLFDGNMLQRLYNVFDVSVQRVKRDHEHNDKVDPHRHFNHLVRKGKKDKYGNNDNPFFKHHFVDREEKVTEAGLLFFVSLFLEKRDAIWMQKKIRGFKGGTEAYQQMTNEVFCRSRISLPKLKLESLRTDDWMLLDMLNELVRCPKLLYDRLREEDRARFRVPVDILSDEDDTDGTEEDPFKNTLVRHQDRFPYFALRYFDLKKVFTSLRFHIDLGTYHFAIYKKNIGEQPEDRHLTRNLYGFGRIQDFAEEHRPEEWKRLVRDLDYFETGDKPYITQTTPHYHIEKGKIGLRFVPEGQLLWPSPEVGATRTGRSKYAQDKRFTAEAFLSVHELMPMMFYYFLLREKYSEEASAEKVQGRIKRVIEDVYAVYDAFARDEINTRDELDACLADKGIRRGHLPRQMIAILSQEHKDMEEKVRKKLQEMIADTDHRLDMLDRQTDRKIRIGRKNAGLPKSGVIADWLVRDMMRFQPVAKDTSGKPLNNSKANSTEYRMLQRALALFGGEKERLTPYFRQMNLTGGNNPHPFLHETRWESHTNILSFYRSYLKARKAFLQSIGRSDREENHRFLLLKEPKTDRQTLVAGWKSEFHLPRGIFTEAVRDCLIEMGYDEVGSYKEVGFMAKAVPLYFERACKDRVQPFYDYPFNVGNSLKPKKGRFLSKEKRAEEWESGKERFRDLEAWSHSAARRIEDAFVGIEYASWENKKKIEQLLQDLSLWETFESKLKVKADKINIAKLKKEILEAKEHPYHDFKSWQKFERELRLVKNQDIITWMMCRDLMEENKVEGLDTGTLYLKDIRTDVQEQGSLNVLNHVKPMRLPVVVYRADSRGHVHKEEAPLATVYIEERDTKLLKQGNFKSFVKDRRLNGLFSFVDTGALAMEQYPISKLRVEYELAKYQTARVCAFEQTLELEESLLTRYPHLPDESFREMLESWSDPLLDKWPDLQREVRLLIAVRNAFSHNQYPMYDETIFSSIRKYDPSSLDAIEERMGLNIAHRLSEEVKLAKEMVERIIQA

SEQ ID NO: 146 - protein, 1175 aa, Porphyromonas gingivalis
MTEQNEKPYNGTYYTLKDKHFWAAFFNLARHNAYITLTHIDRQLAYSKADITNDEDILFFKGQWKNLDNDLERKARLRSLILKHFSFLEGAAYGKKLFESQSSGNKSSKKKELTKKEKEELQANALSLDNLKSILFDFLQKLKDFRNYYSHYRHPESSELPMFDGNMLQRLYNVFDVSVQRVKRDHEHNDKVDPHRHFNHLVRKGKKDRCGNNDNPFFKHHFVDREGKVTEAGLLFFVSLFLEKRDAIWMQKKIRGFKGGTETYQQMTNEVFCRSRISLPKLKLESLRTDDWMLLDMLNELVRCPKSLYDRLREEDRACFRVPVDILSDEDDTDGAEEDPFKNTLVRHQDRFPYFALRYFDLKKVFTSLRFHIDLGTYHFAIYKKNIGEQPEDRHLTRNLYGFGRIQDFAEEHRPEEWKRLVRDLDCFETGDKPYITQTTPHYHIEKGKIGLRFVPEGQHLWPSPEVGATRTGRSKYAQDKRFTAEAFLSVHELMPMMFYYFLLREKYSEEVSAERVQGRIKRVIEDVYAVYDAFARDEINTRDELDACLADKGIRRGHLPRQMIAILSQKHKDMEEKVRKKLQEMIADTDHRLDMLDRQTDRKIRIGRKNAGLPKSGVIADWLVRDMMRFQPVAKDTSGKPLNNSKANSTEYRMLQRALALFGGEKERLTPYFRQMNLTGGNNPHPFLHETRWESHTNILSFYRSYLKARKAFLQSIGRSDRVENHRFLLLKEPKTDRQTLVAGWKGEFHLPRGIFTEAVRDCLIEMGLDEVGSYKEVGFMAKAVPLYFERACKDRVQPFYDYPFNVGNSLKPKKGRFLSKEKRAEEWESGKERFRDLEAWSHSAARRIEDAFAGIENASRENKKKIEQLLQDLSLWETFESKLKVKADKINIAKLKKEILEAKEHPYLDFKSWQKFERELRLVKNQDIITWMMCRDLMEENKVEGLDTGTLYLKDIRTDVQEQGSLNVLNHVKPMRLPVVVYRADSRGHVHKEQAPLATVYIEERDTKLLKQGNFKSFVKDRRLNGLFSFVDTGALAMEQYPISKLRVEYELAKYQTARVCAFEQTLELEESLLTRYPHLPDENFRKMLESWSDPLLDKWPDLHRKVRLLIAVRNAFSHNQYPMYDEAVFSSIRKYDPSSPDAIEERMGLNIAHRLSEEVKQAKEMAERIIQA

SEQ ID NO: 147 - protein, 1213 aa, Flavobacterium colunare
MSSKNESYNKQKTFNHYKQEDKYFFGGFLNNADDNLRQVGKEFKTRINFNHNNNELASVFKDYFNKEKSVAKREHALNLLSNYFPVLERIQKHTNHNFEQTREIFELLLDTIKKLRDYYTHHYHKPITINPKVYDFLDDTLLDVLITIKKKKVKNDTSRELLKEKFRPELTQLKNQKREELIKKGKKLLEENLENAVFNHCLRPFLEENKTDDKQNKTVSLRKYRKSKPNEETSITLTQSGLVFLISFFLHRKEFQVFTSGLEGFKAKVNTIKEEEISLNKNNIVYMITHWSYSYYNFKGLKHRIKTDQGVSTLEQNNTTHSLTNTNTKEALLTQIVDYLSKVPNEIYETLSEKQQKEFEEDINEYMRENPENEDSTFSSIVSHKVIRKRYENKFNYFAMRFLDEYAELPTLRFMVNFGDYIKDRQKKILESIQFDSERIIKKEIHLFEKLGLVTEYKKNVYLKETSNIDLSRFPLFPSPSYVMANNNIPFYIDSRSNNLDEYLNQKKKAQSQNRKRNLTFEKYNKEQSKDAIIAMLQKEIGVKDLQQRSTIGLLSCNELPSMLYEVIVKDIKGAELENKIAQKIREQYQSIRDFTLDSPQKDNIPTTLTKTISTDTSVTFENQPIDIPRLKNALQKELTLTQEKLLNVKQHEIEVDNYNRNKNTYKFKNQPKDKVDDNKLQRKYVFYRNEIGQEANWLASDLIHFMKNKSLWKGYMHNELQSFLAFFEDKKNDCIALLETVFNLKEDCILTKDLKNLFLKHGNFIDFYKEYLKLKEDFLNTESTFLENGFIGLPPKILKKELSKRLNYIFIVFQKRQFIIKELEEKKNNLYADAINLSRGIFDEKPTMIPFKKPNPDEFASWFVASYQYNNYQSFYELTPDKIENDKKKKYKNLRAINKVKIQDYYLKLMVDTLYQDLFNQPLDKSLSDFYVSKTDREKIKADAKAYQKRNDSFLWNKVIHLSLQNNRITANPKLKDIGKYKRALQDEKIATLLTYDDRTWTYALQKPEKENENDYKELHYTALNMELQEYEKVRSKKLLKQVQELEKQILDKFYDFSNNATHPEDLEIEDKKGKRHPNFKLYITKALLKNESEIINLENIDIEILIKYYDYNTEKLKEKIKNMDEDEKAKIVNTKENYNKITNVLIKKALVLIIIRNKMAHNQYPPKFIYDLATRFVPKKEEEYFACYFNRVFETITTELWENKKKAKEIV

SEQ ID NO: 148 - protein, 1119 aa, Porphyromonas gingivalis
MTEQNERPYNGTYYTLEDKHFWAAFFNLARHNAYITLTHIDRQLAYSKADITNDEDILFFKGQWKNLDNDLERKARLRSLILKHFSFLEGAAYGKKLFENKSSGNKSSKKKELTKKEKEELQANALSLDNLKSILFDFLQKLKDFRNYYSHYRHPESSELPLFDGNMLQRLYNVFDVSVQRVKRDHEHNDKVDPHRHFNHLVRKGKKDRCGNNDNPFFKHHFVDREGKVTEAGLLFFVSLFLEKRDAIWMQKKIRGFKGGTEAYQQMTNEVFCRSRISLPKLKLESLRTDDWMLLDMLNELVRCPKSLYDRLREEDRARFRVPVDILSDEDDTDGTEEDPFKNTLVRHQDRFPYFALRYFDLKKVFTSLRFHIDLGTYHFAIYKKNIGEQPEDRHLTRNLYGFGRIQDFAEEHRPEEWKRLVRDLDYFETGDKPYITQTTPHYHIEKGKIGLRFVPEGQHLWPSPEVGATRTGRSKYAQDKRLTAEAFLSVHELMPMMFYYFLLREKYSEEVSAEKVQGRIKRVIEDVYAVYDAFARGEIDTLDRLDACLADKGIRRGHLPRQMIAILSQEHKDMEEKVRKKLQEMIADTDHRLDMLDRQTDRKIRIGRKNAGLPKSGVIADWLVRDMMRFQPVAKDTSGKPLNNSKANSTEYRMLQRALALFGGEKERLTPYFRQMNLTGGNNPHPFLHETRWESHTNILSFYRSYLKARKAFLQSIGRSDREENHRFLLLKEPKTDRQTLVAGWKSEFHLPRGIFTEAVRDCLIEMGYDEVGSYKEVGFMAKAVPLYFERACKDRVQPFYDYPFNVGNSLKPKKGRFLSKEKRAEEWESGKERFRLAKLKKEILEAKEHPYLDFKSWQKFERELRLVKNQDIITWMMCRDLMEENKVEGLDTGTLYLKDIRTEVQEQGSLNVLNRVKPMRLPVVVYRADSRGHVHKEQAPLATVYIEERDTKLLKQGNFKSFVKDRRLNGLFSFVDTGGLAMEQYPISKLRVEYELAKYQTARVCAFEQTLELEESLLTRCPHLPDKNFRKMLESWSDPLLDKWPDLQREVWLLIAVRNAFSHNQYPMYDEAVFSSIRKYDPSSPDAIEERMGLNIAHRLSEEVKQAKEMAERIIQA

SEQ ID NO: 149 - protein, 1135 aa, Porphyromonas gingivalis
MNTVPASENKGQSRTVEDDPQYFGLYLNLARENLIEVESHVRIKFGKKKLNEESLKQSLLCDHLLSVDRWTKVYGHSRRYLPFLHYFDPDSQIEKDHDSKTGVDPDSAQRLIRELYSLLDFLRNDFSHNRLDGTTFEHLEVSPDISSFITGTYSLACGRAQSRFADFFKPDDFVLAKNRKEQLISVADGKECLTVSGLAFFICLFLDREQASGMLSRIRGFKRTDENWARAVHETFCDLCIRHPHDRLESSNTKEALLLDMLNELNRCPRILYDMLPEEERAQFLPALDENSMNNLSENSLNEESRLLWDGSSDWAEALTKRIRHQDRFPYLMLRFIEEMDLLKGIRFRVDLGEIELDSYSKKVGRNGEYDRTITDHALAFGKLSDFQNEEEVSRMISGEASYPVRFSLFAPRYAIYDNKIGYCHTSDPVYPKSKTGEKRALSNPQSMGFISVHDLRKLLLMELLCEGSFSRMQSGFLRKANRILDETAEGKLQFSALFPEMRHRFIPPQNPKSKDRREKAETTLEKYKQEIKGRKDKLNSQLLSAFDMNQRQLPSRLLDEWMNIRPASHSVKLRTYVKQLNEDCRLRLRKFRKDGDGKARAIPLVGEMATFLSQDIVRMIISEETKKLITSAYYNEMQRSLAQYAGEENRRQFRAIVAELHLLDPSSGHPFLSATMETAHRYTEDFYKCYLEKKREWLAKTFYRPEQDENTKRRISVFFVPDGEARKLLPLLIRRRMKEQNDLQDWIRNKQAHPIDLPSHLFDSKIMELLKVKDGKKKWNEAFKDWWSTKYPDGMQPFYGLRRELNIHGKSVSYIPSDGKKFADCYTHLMEKTVQDKKRELRTAGKPVPPDLAADIKRSFHRAVNEREFMLRLVQEDDRLMLMAINKMMTDREEDILPGLKNIDSILDKENQFSLAVHAKVLEKEGEGGDNSLSLVPATIEIKSKRKDWSKYIRYRYDRRVPGLMSHFPEHKATLDEVKTLLGEYDRCRIKIFDWAFALEGAIMSDRDLKPYLHESSSREGKSGEHSTLVKMLVEKKGCLTPDESQYLILIRNKAAHNQFPCAAEMPLIYRDVSAKVGSIEGSSAKDLPEGSSLVDSLWKKYEMIIRKILPILDPENRFFGKLLNNMSQPINDL

SEQ ID NO: 150 - protein, 950 aa, Riemerella anatipestifer
MFFSFHNAQRVIFKHLYKAFDASLRMVKEDYKAHFTVNLTRDFAHLNRKGKNKQDNPDFNRYRFEKDGFFTESGLLFFTNLFLDKRDAYWMLKKVSGFKASHKQSEKMTTEVFCRSRILLPKLRLESRYDHNQMLLDMLSELSRCPKLLYEKLSEKDKKCFQVEADGFLDEIEEEQNPFKDTLIRHQDRFPYFALRYLDLNESFKSIRFQVDLGTYHYCIYDKKIGYEQEKRHLTRTLLNFGRLQDFTEINRPQEWKALTKDLDYNETSNQPFISKTTPHYHITDNKIGFRLRTSKELYPSLEVKDGANRIAKYPYNSDFVAHAFISISVHELLPLMFYQHLTGKSEDLLKETVRHIQRIYKDFEEERINTIEDLEKANQGRLPLGAFPKQMLGLLQNKQPDLSEKAKIKIEKLIAETKLLSHRLNTKLKSSPKLGKRREKLIKTGVLADWLVKDFMRFQPVVYDAQNQPIKSSKANSTESRLIRRALALYGGEKNRLEGYFKQTNLIGNTNPHPFLNKFNWKACRNLVDFYQQYLEQREKFLEAIKHQPWEPYQYCLLLKVPKENRKNLVKGWEQGGISLPRGLFTEAIRETLSKDLTLSKPIRKEIKKHGRVGFISRAITLYFKEKYQDKHQSFYNLSYKLEAKAPLLKKEEHYEYWQQNKPQSPTESQRLELHTSDRWKDYLLYKRWQHLEKKLRLYRNQDIMLWLMTLELTKNHFKELNLNYHQLKLENLAVNVQEADAKLNPLNQTLPMVLPVKVYPTTAFGEVQYHETPIRTVYIREEQTKALKMGNFKALVKDRHLNGLFSFIKEENDTQKHPISQLRLRRELEIYQSLRVDAFKETLSLEEKLLNKHASLSSLENEFRTLLEEWKKKYAASSMVTDKHIAFIASVRNAFCHNQYPFYKETLHAPILLFTVAQPTTEEKDGLGIAEALLRVLREYCEIVKSQI

SEQ ID NO: 151 - protein, 1213 aa, Flavobacterium columnare
MSSKNESYNKQKTFNHYKQEDKYFFGGFLNNADDNLRQVGKEFKTRINFNHNNNELASVFKDYFNKEKSVAKREHALNLLSNYFPVLERIQKHTNHNFEQTREIFELLLDTIKKLRDYYTHHYHKPITINPKIYDFLDDTLLDVLITIKKKKVKNDTSRELLKEKLRPELTQLKNQKREELIKKGKKLLEENLENAVFNHCLRPFLEENKTDDKQNKTVSLRKYRKSKPNEETSITLTQSGLVFLMSFFLHRKEFQVFTSGLEGFKAKVNTIKEEKISLNKNNIVYMITHWSYSYYNFKGLKHRIKTDQGVSTLEQNNTTHSLTNTNTKEALLTQIVDYLSKVPNEIYETLSEKQQKEFEEDINEYMRENPENEDSTFSSIVSHKVIRKRYENKFNYFAMRFLDEYAELPTLRFMVNFGDYIKDRQKKILESIQFDSERIIKKEIHLFEKLGLVTEYKKNVYLKETSNIDLSRFPLFPSPSYVMANNNIPFYIDSRSNNLDEYLNQKKKAQSQNRKRNLTFEKYNKEQSKDAIIAMLQKEIGVKDLQQRSTIGLLSCNELPSMLYEVIVKDIKGAELENKIAQKIREQYQSIRDFTLNSPQKDNIPTTLIKTISTDTSVTFENQPIDIPRLKNAIQKELALTQEKLLNVKQHEIEVNNYNRNKNTYKFKNQPKDKVDDNKLQRKYVFYRNEIGQEANWLASDLIHFMKNKSLWKGYMHNELQSFLAFFEDKKNDCIALLETVFNLKEDCILTKDLKNLFLKHGNFIDFYKEYLKLKEDFLNTESTFLENGFIGLPPKILKKELSKRLNYIFIVFQKRQFIIKELEEKKNNLYADAINLSRGIFDEKPTMIPFKKPNPDEFASWFVASYQYNNYQSFYELTPDKIENDKKKKYKNLRAINKVKIQDYYLKLMVDTLYQDLFNQPLDKSLSDFYVSKTDREKIKADAKAYQKRNDSFLWNKVIHLSLQNNRITANPKLKDIGKYKRALQDEKIATLLTYDDRTWTYALQKPEKENENDYKELHYTALNMELQEYEKVRSKKLLKQVQELEKQILDKFYDFSNNATHPEDLEIEDKKGKRHPNFKLYITKALLKNESEIINLENIDIEILIKYYDYNTEKLKEKIKNMDEDEKAKIVNTKENYNKITNVLIKKALVLIIIRNKMAHNQYPPKFIYDLATRFVPKKEEEYFACYFNRVFETITTELWENKKKAKEIV

SEQ ID NO: 152 - protein, 1095 aa, Riemerella anatipestifer
MEKPLPPNVYTLKHKFFWGAFLNIARHNAFITICHINEQLGLTTPPNDDKIADVVCGTWNNILNNDHDLLKKSQLTELILKHFPFLAAMCYHPPKKEGKKKGSQKEQQKEKENEAQSQAEALNPSELIKVLKTLVKQLRTLRNYYSHHSHKKPDAEKDIFKHLYKAFDASLRMVKEDYKAHFTVNLTQDFAHLNRKGKNKQDNPDFDRYRFEKDGFFTESGLLFFTNLFLDKRDAYWMLKKVSGFKASHKQSEKMTTEVFCRSRILLPKLRLESRYDHNQMLLDMLSELSRYPKLLYEKLSEEDKKRFQVEADGFLDEIEEEQNPFKDTLIRHQDRFPYFALRYLDLNESFKSIRFQVDLGTYHYCIYDKKIGDEQEKRHLTRTLLSFGRLQDFTEINRPQEWKALTKDLDYKETSKQPFISKTTPHYHITDNKIGFRLGTSKELYPSLEVKDGANRIAQYPYNSDFVAHAFISVHELLPLMFYQHLTGKSEDLLKETVRHIQRIYKDFEEERINTIEDLEKANQGRLPLGAFPKQMLGLLQNKQPDLSEKAKIKIEKLIAETKLLSHRLNTKLKSSPKLGKRREKLIKTGVLADWLVKDFMRFQPVAYDAQNQPIESSKANSTEFQLIQRALALYGGEKNRLEGYFKQTNLIGNTNPHPFLNKFNWKACRNLVDFYQQYLEQREKFLEAIKNQPWEPYQYCLLLKIPKENRKNLVKGWEQGGISLPRGLFTEAIRETLSKDLTLSKPIRKEIKKHGRVGFISRAITLYFREKYQDDHQSFYDLPYKLEAKASPLPKKEHYEYWQQNKPQSPTELQRLELHTSDRWKDYLLYKRWQHLEKKLRLYRNQDVMLWLMTLELTKNHFKELNLNYHQLKLENLAVNVQEADAKLNPLNQTLPMVLPVKVYPATAFGEVQYQETPIRTVYIREEQTKALKMGNFKALVKDRRLNGLFSFIKEENDTQKHPISQLRLRRELEIYQSLRVDAFKETLNLEEKLLKKHTSLSSVENKFRILLEEWKKEYAASSMVTDEHIAFIASVRNAFCHNQYPFYEEALHAPIPLFTVAQQTTEEKDGLGIAEALLRVLREYCEIVKSQI

SEQ ID NO: 153 - protein, 1149 aa, Sinomicrobium oceani
MESTTTLGLHLKYQHDLFEDKHYFGGGVNLAVQNIESIFQAFAERYGIQNPLRKNGVPAINNIFHDNISISNYKEYLKFLKQYLPVVGFLEKSNEINIFEFREDFEILINAIYKLRHFYTHYYHSPIKLEDRFYTCLNELFVAVAIQVKKHKMKSDKTRQLLNKNLHQLLQQLIEQKREKLKDKKAEGEKVSLDTKSIENAVLNDAFVHLLDKDENIRLNYSSRLSEDIITKNGITLSISGLLFLLSLFLQRKEAEDLRSRIEGFKGKGNELRFMATHWVFSYLNVKRIKHRLNTDFQKETLLIQIADELSKVPDEVYKTLDHENRSKFLEDINEYIREGNEDASLNESTVVHGVIRKRYENKFHYLVLRYLDEFVDFPSLRFQVHLGNYIHDRRDKVIDGTNFITNRVIKEPIKVFGKLSHVSKLKSDYMESLSREHKNGWDVFPNPSYNFVGHNIPIFINLRSASSKGKELYRDLMKIKSEKKKKSREEGIPMERRDGKPTKIEISNQIDRNIKDNNFKDIYPGEPLAMLSLNELPALLFELLRRPSITPQDIEDRMVEKLYERFQIIRDYKPGDGLSTSKISKKLRKADNSTRLDGKKLLRAIQTETRNAREKLHTLEENKALQKNRKRRTVYTTREQGREASWLAQDLKRFMPIASRKEWRGYHHSQLQQILAFYDQNPKQPLELLEQFWDLKEDTYVWNSWIHKSLSQHNGFVPMYEGYLKGRLGYYKKLESDIIGFLEEHKVLKRYYTQQHLNVIFRERLYFIKTETKQKLELLARPLVFPRGIFDDKPTFVQDKKVVDHPELFADWYVYSYKDDHSFQEFYHYKRDYNEIFETELSWDIDFKDNKRQLNPSEQMDLFRMKWDLKIKKIKIQDIFLKIVAEDIYLKIFGHKIPLSLSDFYISRQERLTLDEQAVAQSMRLPGDTSENQIKESNLWQTTVPYEKEQIREPKIKLKDIGKFKYFLQQQKVLNLLKYDPQHVWTKAELEEELYIGKHSYEVVRREMLLQKCHQLEKHILEQFRFDGSNHPRELEQGNHPNFKMYIVNGILTKRGELEIEAENWWLELGNSKNSLDKVEVELLTMKTIPEQKAFLLILIRNKFAHNQLPADNYFHYASNLMNLKKSDTYSLFWFTVADTIVQEFMSL

SEQ ID NO: 154 - protein, 1133 aa, Reichenbachiella agariperforans
MKTNPLIASSGEKPNYKKFNTESDKSFKKIFQNKGSIAPIAEKACKNFEIKSKSPVNRDGRLHYFSVGHAFKNIDSKNVFRYELDESQMDMKPTQFLALQKEFFDFQGALNGLLKHIRNVNSHYVHTFEKLEIQSINQKLITFLIEAFELAVIHSYLNEEELSYEAYKDDPQSGQKLVQFLCDKFYPNKEHEVEERKTILAKNKRQALEHLLFIEVTSDIDWKLFEKHKVFTISNGKYLSFHACLFLLSLFLYKSEANQLISKIKGFKRNDDNQYRSKRQIFTFFSKKFTSQDVNSEEQHLVKFRDVIQYLNHYPSAWNKHLELKSGYPQMTDKLMRYIVEAEIYRSFPDQTDNHRFLLFAIREFFGQSCLDTWTGNTPINFSNQEQKGFSYEINTSAEIKDIETKLKALVLKGPLNFKEKKEQNRLEKDLRREKKEQPTNRVKEKLLTRIQHNMLYVSYGRNQDRFMDFAARFLAETDYFGKDAKFKMYQFYTSDEQRDHLKEQKKELPKKEFEKLKYHQSKLVDYFTYAEQQARYPDWDTPFVVENNAIQIKVTLFNGAKKIVSVQRNLMLYLLEDALYSEKRENAGKGLISGYFVHHQKELKDQLDILEKETEISREQKREFKKLLPKRLLHRYSPAQINDTTEWNPMEVILEEAKAQEQRYQLLLEKAILHQTEEDFLKRNKGKQFKLRFVRKAWHLMYLKELYMNKVAEHGHHKSFHITKEEFNDFCRWMFAFDEVPKYKEYLCDYFSQKGFFNNAEFKDLIESSTSLNDLYEKTKQRFEGWSKDLTKQSDENKYLLANYESMLKDDMLYVNISHFISYLESKGKINRNAHGHIAYKALNNVPHLIEEYYYKDRLAPEEYKSHGKLYNKLKTVKLEDALLYEMAMHYLSLEPALVPKVKTKVKDILSSNIAFDIKDAAGHHLYHLLIPFHKIDSFVALINHQSQQEKDPDKTSFLAKIQPYLEKVKNSKDLKAVYHYYKDTPHTLRYEDLNMIHSHIVSQSVQFTKVALKLEEYFIAKKSITLQIARQISYSEIADLSNYFTDEVRNTAFHFDVPETAYSMILQGIESEFLDREIKPQKPKSLSELSTQQVSVCTAFLETLHNNLFDRKDDKKERLSKARERYFEQIN

SEQ ID NO: 155 - protein, 1115 aa, Fusobacterium necrophorum subsp. funduliforme
MEKFRRQNRNSIIKIIISNYDTKGIKELKVRYRKQAQLDTFIIKTEIVNNDIFIKSIIEKAREKYRYSFLFDGEEKYHFKNKSSVEIVKKDIFSQTPDNMIRNYKITLKISEKNPRVVEAEIEDLMNSTILKDGRRSARREKSMTERKLIEEKVAKNYSLLANCPMEEVDSIKIYKIKRFLTYRSNMLLYFASINSFLCEGIKGKDNETEEIWHLKDNDVRKEKVRENFKNKLIQSTENYNSSLKNQIEEKEKLLRKEFKKGAFYRTIIKKLQQERIKELSEKSLTEDCEKIIKLYSKLRHSLMHYDYQYFENLFENKKNDDLMKDLNLDLFKSLPLIRKMKLNNKVNYLEDGDTLFVLQKTKKAKTLYQIYDALCEQKNGFNKFINDFFVSDGEENTVFKQIINEKFQSEMEFLEKRISESEKKNEKLKKKLDSMKAHFRNINSEDTKEAYFWDIHSSRNYKTKYNERKNLVNEYTELLGSSKEKKLLREEITKINRQLLKLKQEMEEITKKNSLFRLEYKMKIAFGFLFCEFDGNISKFKDEFDASNQEKIIQYHKNGEKYLTSFLKEEEKEKFNLEKMQKIIQKTEEEDWLLPETKNNLFKFYLLTYLLLPYELKGDFLGFVKKHYYDIKNVDFIDENQNNIQVSQTVEKQEDYFYHKIRLFEKNTKKYEIVKYSIVPNEKLKQYFEDLGIDIKYLTVEQKSEVSEEKNKKVSLKNNGMFNKTILLFVFKYYQIAFKLFNDIELYSLFFLREKSGKPLEIFRKELESKMKDGYLNFGQLLYVVYEVLVKNKDLDKILSKKIDYRKDKSFSPEIAYLRNFLSHLNYSKFLDNFMKINTNKSDENKEVLIPSIKIQKMIQFIEKCNLQNQIDFDFNFVNDFYMRKEKMFFIQLKQIFPDINSTEKQKMNEKEEILRNRYHLTDKKNEQIKDEHEAQSQLYEKILSLQKIYSSDKNNFYGRLKEEKLLFLEKQGKKKLSMEEIKDKIAGDISDLLGILKKEITRDIKDKLTEKFRYCEEKLLNLSFYNHQDKKKEESIRVFLIRDKNSDNFKFESILDDGSNKIFISKNGKEITIQCCDKVLETLIIEKNTLKISSNGKIISLIPHYSYSIDVKY

SEQ ID NO: 156 - protein, 1111 aa, Fusobacterium necrophorum
MEKFRRQNRSSIIKIIISNYDTKGIKELKVRYRKQAQLDTFIIKTEIVNNDIFIKSIIEKAREKYRYSFLFDGEEKYHFKNKSSVEIVKKDIFSQTPDNMIRNYKITLKISEKNPRVVEAEIEDLMNSTILKDGRRSARREKSMTERKLIEEKVAENYSLLANCPMEEVDSIKIYKIKRFLTYRSNMLLYFASINSFLCEGIKGKDNETEEIWHLKDNDVRKEKVKENFKNKLIQSTENYNSSLKNQIEEKEKLLRKESKKGAFYRTIIKKLQQERIKELSEKSLTEDCEKIIKLYSELRHPLMHYDYQYFENLFENKENSELTKNLNLDIFKSLPLVRKMKLNNKVNYLEDNDTLFVLQKTKKAKTLYQIYDALCEQKNGFNKFINDFFVSDGEENTVFKQIINEKFQSEIEFLEKRISESEKKNEKLKKKLDSMKAHFRNINSEDTKEAYFWDIHSSRNYKTKYNERKNLVNEYTELLGSSKEKKLLREEITKINRQLLKLKQEMEEITKKNSLFRLEYKMKMAFGFLFCEFDGNISRFKDEFDASNQEKIIQYHKNGEKYLTYFLKEEEKEKFNLKKLQETIQKTGEENWLLPQNKNNLFKFYLLTYLLLPYELKGDFLGFVKKHYYDIKNVDFMDENQSSKIIESKEDDFYHKIRLFEKNTKKYEIVKYSIVPDKKLKQYFKDLGIDTKYLILDQKSEVSGEKNKKVSLKNNGMFNKTILLFVFKYYQIAFKLFNDIELYSLFFLREKSGKPFEVFLKELKDKMIGKQLNFGQLLYVVYEVLVKNKDLSEILSERIDYRKDMCFSAEIADLRNFLSHLNYSKFLDNFMKINTNKSDENKEVLIPSIKIQKMIKFIEECNLQSQIDFDFNFVNDFYMRKEKMFFIQLKQIFPDINSTEKQKMNEKEEILRNRYHLTDKKNEQIKDEHEAQSQLYEKILSLQKIYSSDKNNFYGRLKEEKLLFLEKQEKKKLSMEEIKDKIAGDISDLLGILKKEITRDIKDKLTEKFRYCEEKLLNLSFYNHQDKKKEESIRVFLIRDKNSDNFKFESILDDGSNKIFISKNGKEITIQCCDKVLETLIIEKNTLKISSNGKIISLIPHYSYSIDVKY

SEQ ID NO: 157 - protein, 1110 aa, Fusobacterium necrophorum
MKVRYRKQAQLDTFIIKTEIVNNDIFIKSIIEKAREKYRYSFLFDGEEKYHFKNKSSVEIVKNDIFSQTPDNMIRNYKITLKISEKNPRVVEAEIEDLMNSTILKDGRRSARREKSMTERKLIEEKVAENYSLLANCPIEEVDSIKIYKIKRFLTYRSNMLLYFASINSFLCEGIKGKDNETEEIWHLKDNDVRKEKVKENFKNKLIQSTENYNSSLKNQIEEKEKLSSKEFKKGAFYRTIIKKLQQERIKELSEKSLTEDCEKIIKLYSELRHPLMHYDYQYFENLFENKENSELTKNLNLDIFKSLPLVRKMKLNNKVNYLEDNDTLFVLQKTKKAKTLYQIYDALCEQKNGFNKFINDFFVSDGEENTVFKQIINEKFQSEMEFLEKRISESEKKNEKLKKKLDSMKAHFRNINSEDTKEAYFWDIHSSRNYKTKYNERKNLVNEYTKLLGSSKEKKLLREEITKINRQLLKLKQEMEEITKKNSLFRLEYKMKIAFGFLFCEFDGNISKFKDEFDASNQEKIIQYHKNGEKYLTSFLKEEEKEKFNLEKMQKIIQKTEEEDWLLPETKNNLFKFYLLTYLLLPYELKGDFLGFVKKHYYDIKNVDFMDENQNNIQVSQTVEKQEDYFYHKIRLFEKNTKKYEIVKYSIVPNEKLKQYFEDLGIDIKYLTGSVESGEKWLGENLGIDIKYLTVEQKSEVSEEKNKKVSLKNNGMFNKTILLFVFKYYQIAFKLFNDIELYSLFFLREKSEKPFEVFLEELKDKMIGKQLNFGQLLYVVYEVLVKNKDLDKILSKKIDYRKDKSFSPEIAYLRNFLSHLNYSKFLDNFMKINTNKSDENKEVLIPSIKIQKMIQFIEKCNLQNQIDFDFNFVNDFYMRKEKMFFIQLKQIFPDINSTEKQKKSEKEEILRKRYHLINKKNEQIKDEHEAQSQLYEKILSLQKIFSCDKNNFYRRLKEEKLLFLEKQGKKKISMKEIKDKIASDISDLLGILKKEITRDIKDKLTEKFRYCEEKLLNISFYNHQDKKKEEGIRVFLIRDKNSDNFKFESILDDGSNKIFISKNGKEITIQCCDKVLETLMIEKNTLKISSNGKIISLIPHYSYSIDVKY

SEQ ID NO: 158 - protein, 668 aa, Fusobacterium necorphorum subsp. funduliforme
MTEKKSIIFKNKSSVEIVKKDIFSQTPDNMIRNYKITLKISEKNPRVVEAEIEDLMNSTILKDGRRSARREKSMTERKLIEEKVAENYSLLANCPMEEVDSIKIYKIKRFLTYRSNMLLYFASINSFLCEGIKGKDNETEEIWHLKDNDVRKEKVKENFKNKLIQSTENYNSSLKNQIEEKEKLLRKESKKGAFYRTIIKKLQQERIKELSEKSLTEDCEKIIKLYSELRHPLMHYDYQYFENLFENKENSELTKNLNLDIFKSLPLVRKMKLNNKVNYLEDNDTLFVLQKTKKAKTLYQIYDALCEQKNGFNKFINDFFVSDGEENTVFKQIINEKFQSEMEFLEKRISESEKKNEKLKKKFDSMKAHFHNINSEDTKEAYFWDIHSSSNYKTKYNERKNLVNEYTELLGSSKEKKLLREEITQINRKLLKLKQEMEEITKKNSLFRLEYKMKIAFGFLFCEFDGNISKFKDEFDASNQEKIIQYHKNGEKYLTYFLKEEEKEKFNLEKMQKIIQKTEEEDWLLPETKNNLFKFYLLTYLLLPYELKGDFLGFVKKHYYDIKNVDFMDENQNNIQVSQTVEKQEDYFYHKIRLFEKNTKKYEIVKYSIVPNEKLKQYFEDLGIDIKYLTGSVESGEKWLGENLGIDIKYLTVEQKSEVSEEKIKKFL

SEQ ID NO: 159 - protein, 1121 aa, Fusobacterium perfoetens
MGKPNRSSIIKIIISNYDNKGIKEVKVRYNKQAQLDTFLIKSELKDGKFILYSIVDKAREKYRYSFEIDKTNINKNEILIIKKDIYSNKEDKVIRKYILSFEVSEKNDRTIVTKIKDCLETQKKEKFERENTRRLISETERKLLSEETQKTYSKIACCSPEDIDSVKIYKIKRYLAYRSNMLLFFSLINDIFVKGVVKDNGEEVGEIWRIIDSKEIDEKKTYDLLVENFKKRMSQEFINYKQSIENKIEKNTNKIKEIEQKLKKEKYKKEINRLKKQLIELNRENDLLEKDKIELSDEEIREDIEKILKIYSDLRHKLMHYNYQYFENLFENKKISKEKNEDVNLTELLDLNLFRYLPLVRQLKLENKTNYLEKEDKITVLGVSDSAIKYYSYYNFLCEQKNGFNNFINSFFSNDGEENKSFKEKINLSLEKEIEIMEKETNEKIKEINKNELQLMKEQKELGTAYVLDIHSLNDYKISHNERNKNVKLQNDIMNGNRDKNALDKINKKLVELKIKMDKITKRNSILRLKYKLQVAYGFLMEEYKGNIKKFKDEFDISKEKIKSYKSKGEKYLEVKSEKKYITKILNSIEDIHNITWLKNQEENNLFKFYVLTYILLPFEFRGDFLGFVKKHYYDIKNVEFLDENNDRLTPEQLEKMKNDSFFNKIRLFEKNSKKYDILKESILTSERIGKYFSLLNTGAKYFEYGGEENRGIFNKNIIIPIFKYYQIVLKLYNDVELAMLLTLSESDEKDINKIKELVTLKEKVSPKKIDYEKKYKFSVLLDCFNRIINLGKKDFLASEEVKEVAKTFTNLAYLRNKICHLNYSKFIDDLLTIDTNKSTTDSEGKLLINDRIRKLIKFIRENNQKMNISIDYNYINDYYMKKEKFIFGQRKQAKTIIDSGKKANKRNKAEELLKMYRVKKENINLIYELSKKLNELTKSELFLLDKKLLKDIDFTDVKIKNKSFFELKNDVKEVANIKQALQKHSSELIGIYKKEVIMAIKRSIVSKLIYDEEKVLSIIIYDKTNKKYEDFLLEIRRERDINKFQFLIDEKKEKLGYEKIIETKEKKKVVVKIQNNSELVSEPRIIKNKDKKKAKTPEEISKLGILDLTNHYCFNLKITL

SEQ ID NO: 160 - protein, 897 aa, Fusobacterium ulcerans
MENKGNNKKIDFDENYNILVAQIKEYFTKEIENYNNRIDNIIDKKELLKYSEKKEESEKNKKLEELNKLKSQKLKILTDEEIKADVIKIIKIFSDLRHSLMHYEYKYFENLFENKKNEELAELLNLNLFKNLTLLRQMKIENKTNYLEGREEFNIIGKNIKAKEVLGHYNLLAEQKNGFNNFINSFFVQDGTENLEFKKLIDEHFVNAKKRLERNIKKSKKLEKELEKMEQHYQRLNCAYVWDIHTSTTYKKLYNKRKSLIEEYNKQINEIKDKEVITAINVELLRIKKEMEEITKSNSLFRLKYKMQIAYAFLEIEFGGNIAKFKDEFDCSKMEEVQKYLKKGVKYLKYYKDKEAQKNYEFPFEEIFENKDTHNEEWLENTSENNLFKFYILTYLLLPMEFKGDFLGVVKKHYYDIKNVDFTDESEKELSQVQLDKMIGDSFFHKIRLFEKNTKRYEIIKYSILTSDEIKRYFRLLELDVPYFEYEKGTDEIGIFNKNIILTIFKYYQIIFRLYNDLEIHGLFNISSDLDKILRDLKSYGNKNINFREFLYVIKQNNNSSTEEEYRKIWENLEAKYLRLHLLTPEKEEIKTKTKEELEKLNEISNLRNGICHLNYKEIIEEILKTEISEKNKEATLNEKIRKVINFIKENELDKVELGFNFINDFFMKKEQFMFGQIKQVKEGNSDSITTERERKEKNNKKLKETYELNCDNLSEFYETSNNLRERANSSSLLEDSAFLKKIGLYKVKNNKVNSKVKDEEKRIENIKRKLLKDSSDIMGMYKAEVVKKLKEKLILIFKHDEEKRIYVTVYDTSKAVPENISKEILVKRNNSKEEYFFEDNNKKYVTEYYTLEITETNELKVIPAKKLEGKEFKTEKNKENKLMLNNHYCFNVKIIY

SEQ ID NO: 161 - protein, 1111 aa, Anaerosalibacter sp.
MKSGRREKAKSNKSSIVRVIISNFDDKQVKEIKVLYTKQGGIDVIKFKSTEKDEKGRMKFNFDCAYNRLEEEEFNSFGGKGKQSFFVTTNEDLTELHVTKRHKTTGEIIKDYTIQGKYTPIKQDRTKVTVSITDNKDHFDSNDLGDKIRLSRSLTQYTNRILLDADVMKNYREIVCSDSEKVDETINIDSQEIYKINRFLSYRSNMIIYYQMINNFLLHYDGEEDKGGNDSINLINEIWKYENKKNDEKEKIIERSYKSIEKSINQYILNHNTEVESGDKEKKIDISEERIKEDLKKTFILFSRLRHYMVHYNYKFYENLYSGKNFIIYNKDKSKSRRFSELLDLNIFKELSKIKLVKNRAVSNYLDKKTTIHVLNKNINAIKLLDIYRDICETKNGFNNFINNMMTISGEEDKEYKEMVTKHFNENMNKLSIYLENFKKHSDFKTNNKKKETYNLLKQELDEQKKLRLWFNAPYVYDIHSSKKYKELYVERKKYVDIHSKLIEAGINNDNKKKLNEINVKLCELNTEMKEMTKLNSKYRLQYKLQLAFGFILEEFNLDIDKFVSAFDKDNNLTISKFMEKRETYLSKSLDRRDNRFKKLIKDYKFRDTEDIFCSDRENNLVKLYILMYILLPVEIRGDFLGFVKKNYYDLKHVDFIDKRNNDNKDTFFHDLRLFEKNVKRLEVTSYSLSDGFLGKKSREKFGKELEKFIYKNVSIALPTNIDIKEFNKSLVLPMMKNYQIIFKLLNDIEISALFLIAKKEGNEGSITFKKVIDKVRKEDMNGNINFSQVMKMALNEKVNCQIRNSIAHINMKQLYIEPLNIYINNNQNKKTISEQMEEIIDICITKGLTGKELNKNIINDYYMKKEKLVFNLKLRKRNNLVSIDAQQKNMKEKSILNKYDLNYKDENLNIKEIILKVNDLNNKQKLLKETTEGESNYKNALSKDILLLNGIIRKNINFKIKEMILGIIQQNEYRYVNINIYDKIRKEDHNIDLKINNKYIEISCYENKSNESTDERINFKIKYMDLKVKNELLVPSCYEDIYIKKKIDLEIRYIENCKVVYIDIYYKKYNINLEFDGKTLFVKFNKDVKKNNQKVNLESNYIQNIKFIVS

SEQ ID NO: 162 - DNA, 45 bp, Artificial Sequence
  Synthetic
catagaatgttctaaaccatcctgcggcctctactctgcattcaa

SEQ ID NO: 163 - DNA, 45 bp, Artificial Sequence
  Synthetic
catagaatgttcgaaaccatcctgcggcctctactctgcattcaa

SEQ ID NO: 164 - DNA, 45 bp, Artificial Sequence
  Synthetic
catagaatggtcgaaaccatcctgcggcctctactctgcattcaa

SEQ ID NO: 165 - DNA, 45 bp, Artificial Sequence
  Synthetic
catagaatgttcaaaaccatcctgcggcctctactctgcattcaa

SEQ ID NO: 166 - DNA, 45 bp, Artificial Sequence
  Synthetic
catagaatgatcaaaaccatcctgcggcctctactctgcattcaa

SEQ ID NO: 167 - DNA, 46 bp, Artificial Sequence
  Synthetic
ggtttctccatcaattaccacttgcttcctgtaggaatcctctatt

SEQ ID NO: 168 - DNA, 46 bp, Artificial Sequence
  Synthetic
ggtttctccatcaatgaccacttgcttcctgtaggaatcctctatt

SEQ ID NO: 169 - DNA, 46 bp, Artificial Sequence
  Synthetic
ggtttctccatcaaggaccacttgcttcctgtaggaatcctctatt

SEQ ID NO: 170 - DNA, 46 bp, Artificial Sequence
  Synthetic
ggtttctccatcaataaccacttgcttcctgtaggaatcctctatt

SEQ ID NO: 171 - DNA, 46 bp, Artificial Sequence
  Synthetic
ggtttctccatcaaaaaccacttgcttcctgtaggaatcctctatt

SEQ ID NO: 172 - DNA, 46 bp, Artificial Sequence
  Synthetic
gcctttctctcctgtagccaaggccacaaaattatccactgttttt

SEQ ID NO: 173 - DNA, 46 bp, Artificial Sequence
  Synthetic
gcctttctctcctggagccaaggccacaaaattatccactgttttt

SEQ ID NO: 174 - DNA, 46 bp, Artificial Sequence
  Synthetic
gcctttctctcctgaagccaaggccacaaaattatccactgttttt

SEQ ID NO: 175 - DNA, 46 bp, Artificial Sequence
  Synthetic
gcatagaatgttctaaaccatcctgcggcctctactctgcattcaa

SEQ ID NO: 176 - DNA, 46 bp, Artificial Sequence
  Synthetic
gcatagaatgttctaaacgatcctgcggcctctactctgcattcaa

SEQ ID NO: 177 - DNA, 46 bp, Artificial Sequence
  Synthetic
gcatagaatgttctaaactatcctgcggcctctactctgcattcaa

SEQ ID NO: 178 - DNA, 46 bp, Artificial Sequence
  Synthetic
gcatagaatgttctaaacaatcctgcggcctctactctgcattcaa

SEQ ID NO: 179 - DNA, 31 bp, Artificial Sequence
  Synthetic
gcatcctgcggcctctactctgcattcaatt

SEQ ID NO: 180 - DNA, 31 bp, Artificial Sequence
  Synthetic
gaccatcctgcggcctctactctgcattcaa

SEQ ID NO: 181 - DNA, 31 bp, Artificial Sequence
  Synthetic
gaaaccatcctgcggcctctactctgcattc

SEQ ID NO: 182 - DNA, 31 bp, Artificial Sequence
  Synthetic
gctaaaccatcctgcggcctctactctgcat

SEQ ID NO: 183 - DNA, 31 bp, Artificial Sequence
  Synthetic
gttctaaaccatcctgcggcctctactctgc

SEQ ID NO: 184 - DNA, 31 bp, Artificial Sequence
  Synthetic
gtgttctaaaccatcctgcggcctctactct

SEQ ID NO: 185 - DNA, 31 bp, Artificial Sequence
  Synthetic
gaatgttctaaaccatcctgcggcctctact

SEQ ID NO: 186 - DNA, 31 bp, Artificial Sequence
  Synthetic
gagaatgttctaaaccatcctgcggcctcta

SEQ ID NO: 187 - DNA, 31 bp, Artificial Sequence
  Synthetic
gatagaatgttctaaaccatcctgcggcctc

SEQ ID NO: 188 - DNA, 31 bp, Artificial Sequence
  Synthetic
gccatagaatgttctaaaccatcctgcggcc

SEQ ID NO: 189 - DNA, 31 bp, Artificial Sequence
  Synthetic
gttccatagaatgttctaaaccatcctgcgg

SEQ ID NO: 190 - DNA, 31 bp, Artificial Sequence
  Synthetic
gctttccatagaatgttctaaaccatcctgc

SEQ ID NO: 191 - DNA, 31 bp, Artificial Sequence
  Synthetic
gctctttccatagaatgttctaaaccatcct

SEQ ID NO: 192 - DNA, 31 bp, Artificial Sequence
  Synthetic
gatctctttccatagaatgttctaaaccatc

SEQ ID NO: 193 - DNA, 31 bp, Artificial Sequence
  Synthetic
ggaatctctttccatagaatgttctaaacca

SEQ ID NO: 194 - DNA, 51 bp, Artificial Sequence
  Synthetic
gcatcctgcggcctctactctgcattcaattacatactgacacattcggca

SEQ ID NO: 195 - DNA, 51 bp, Artificial Sequence
  Synthetic
gaccatcctgcggcctctactctgcattcaattacatactgacacattcgg

SEQ ID NO: 196 - DNA, 51 bp, Artificial Sequence
  Synthetic
gaaaccatcctgcggcctctactctgcattcaattacatactgacacattc

SEQ ID NO: 197 - DNA, 51 bp, Artificial Sequence
  Synthetic
gctaaaccatcctgcggcctctactctgcattcaattacatactgacacat

SEQ ID NO: 198 - DNA, 51 bp, Artificial Sequence
  Synthetic
gttctaaaccatcctgcggcctctactctgcattcaattacatactgacac

SEQ ID NO: 199 - DNA, 51 bp, Artificial Sequence
  Synthetic
gtgttctaaaccatcctgcggcctctactctgcattcaattacatactgac

SEQ ID NO: 200 - DNA, 51 bp, Artificial Sequence
  Synthetic
gaatgttctaaaccatcctgcggcctctactctgcattcaattacatactg

SEQ ID NO: 201 - DNA, 51 bp, Artificial Sequence
  Synthetic
gagaatgttctaaaccatcctgcggcctctactctgcattcaattacatac

SEQ ID NO: 202 - DNA, 51 bp, Artificial Sequence
  Synthetic
gatagaatgttctaaaccatcctgcggcctctactctgcattcaattacat

SEQ ID NO: 203 - DNA, 51 bp, Artificial Sequence
  Synthetic
gccatagaatgttctaaaccatcctgcggcctctactctgcattcaattac

SEQ ID NO: 204 - DNA, 51 bp, Artificial Sequence
  Synthetic
gttccatagaatgttctaaaccatcctgcggcctctactctgcattcaatt

SEQ ID NO: 205 - DNA, 51 bp, Artificial Sequence
  Synthetic
gctttccatagaatgttctaaaccatcctgcggcctctactctgcattcaa

SEQ ID NO: 206 - DNA, 51 bp, Artificial Sequence
  Synthetic
gctctttccatagaatgttctaaaccatcctgcggcctctactctgcattc

SEQ ID NO: 207 - DNA, 51 bp, Artificial Sequence
  Synthetic
gatctctttccatagaatgttctaaaccatcctgcggcctctactctgcat

SEQ ID NO: 208 - DNA, 51 bp, Artificial Sequence
  Synthetic
ggaatctctttccatagaatgttctaaaccatcctgcggcctctactctgc

SEQ ID NO: 209 - DNA, 51 bp, Artificial Sequence
  Synthetic
gtggaatctctttccatagaatgttctaaaccatcctgcggcctctactct

SEQ ID NO: 210 - DNA, 51 bp, Artificial Sequence
  Synthetic
gactggaatctctttccatagaatgttctaaaccatcctgcggcctctact

SEQ ID NO: 211 - DNA, 51 bp, Artificial Sequence
  Synthetic
ggaactggaatctctttccatagaatgttctaaaccatcctgcggcctcta

SEQ ID NO: 212 - DNA, 51 bp, Artificial Sequence
  Synthetic
gtggaactggaatctctttccatagaatgttctaaaccatcctgcggcctc

SEQ ID NO: 213 - DNA, 51 bp, Artificial Sequence
  Synthetic
gcctggaactggaatctctttccatagaatgttctaaaccatcctgcggcc

SEQ ID NO: 214 - DNA, 51 bp, Artificial Sequence
  Synthetic
gttcctggaactggaatctctttccatagaatgttctaaaccatcctgcgg

SEQ ID NO: 215 - DNA, 51 bp, Artificial Sequence
  Synthetic
gggttcctggaactggaatctctttccatagaatgttctaaaccatcctgc

SEQ ID NO: 216 - DNA, 51 bp, Artificial Sequence
  Synthetic
gcaggttcctggaactggaatctctttccatagaatgttctaaaccatcct

SEQ ID NO: 217 - DNA, 51 bp, Artificial Sequence
  Synthetic
gaccaggttcctggaactggaatctctttccatagaatgttctaaaccatc

SEQ ID NO: 218 - DNA, 51 bp, Artificial Sequence
  Synthetic
ggtaccaggttcctggaactggaatctctttccatagaatgttctaaacca

SEQ ID NO: 219 - DNA, 71 bp, Artificial Sequence
  Synthetic
gcatcctgcggcctctactctgcattcaattacatactgacacattcggcaacatgtttttcctggtttat

SEQ ID NO: 220 - DNA, 71 bp, Artificial Sequence
  Synthetic
gaccatcctgcggcctctactctgcattcaattacatactgacacattcggcaacatgtttttcctggttt

SEQ ID NO: 221 - DNA, 71 bp, Artificial Sequence
  Synthetic
gaaaccatcctgcggcctctactctgcattcaattacatactgacacattcggcaacatgtttttcctggt

SEQ ID NO: 222 - DNA, 71 bp, Artificial Sequence
  Synthetic
gctaaaccatcctgcggcctctactctgcattcaattacatactgacacattcggcaacatgtttttcctg

SEQ ID NO: 223 - DNA, 71 bp, Artificial Sequence
  Synthetic
gttctaaaccatcctgcggcctctactctgcattcaattacatactgacacattcggcaacatgtttttcc

SEQ ID NO: 224 - DNA, 71 bp, Artificial Sequence
  Synthetic
gtgttctaaaccatcctgcggcctctactctgcattcaattacatactgacacattcggcaacatgttttt

SEQ ID NO: 225 - DNA, 71 bp, Artificial Sequence
  Synthetic
gaatgttctaaaccatcctgcggcctctactctgcattcaattacatactgacacattcggcaacatgttt

SEQ ID NO: 226 - DNA, 71 bp, Artificial Sequence
  Synthetic
gagaatgttctaaaccatcctgcggcctctactctgcattcaattacatactgacacattcggcaacatgt

SEQ ID NO: 227 - DNA, 71 bp, Artificial Sequence
  Synthetic
gatagaatgttctaaaccatcctgcggcctctactctgcattcaattacatactgacacattcggcaacat

SEQ ID NO: 228 - DNA, 71 bp, Artificial Sequence
  Synthetic
gccatagaatgttctaaaccatcctgcggcctctactctgcattcaattacatactgacacattcggcaac

SEQ ID NO: 229 - DNA, 71 bp, Artificial Sequence
  Synthetic
gttccatagaatgttctaaaccatcctgcggcctctactctgcattcaattacatactgacacattcggca

SEQ ID NO: 230 - DNA, 71 bp, Artificial Sequence
  Synthetic
gctttccatagaatgttctaaaccatcctgcggcctctactctgcattcaattacatactgacacattcgg

SEQ ID NO: 231 - DNA, 71 bp, Artificial Sequence
  Synthetic
gctctttccatagaatgttctaaaccatcctgcggcctctactctgcattcaattacatactgacacattc

SEQ ID NO: 232 - DNA, 71 bp, Artificial Sequence
  Synthetic
gatctctttccatagaatgttctaaaccatcctgcggcctctactctgcattcaattacatactgacacat

SEQ ID NO: 233 - DNA, 71 bp, Artificial Sequence
  Synthetic
ggaatctctttccatagaatgttctaaaccatcctgcggcctctactctgcattcaattacatactgacac

SEQ ID NO: 234 - DNA, 71 bp, Artificial Sequence
  Synthetic
gtggaatctctttccatagaatgttctaaaccatcctgcggcctctactctgcattcaattacatactgac

SEQ ID NO: 235 - DNA, 71 bp, Artificial Sequence
  Synthetic
gactggaatctctttccatagaatgttctaaaccatcctgcggcctctactctgcattcaattacatactg

SEQ ID NO: 236 - DNA, 71 bp, Artificial Sequence
  Synthetic
ggaactggaatctctttccatagaatgttctaaaccatcctgcggcctctactctgcattcaattacatac

SEQ ID NO: 237 - DNA, 71 bp, Artificial Sequence
  Synthetic
gtggaactggaatctctttccatagaatgttctaaaccatcctgcggcctctactctgcattcaattacat

SEQ ID NO: 238 - DNA, 71 bp, Artificial Sequence
  Synthetic
gcctggaactggaatctctttccatagaatgttctaaaccatcctgcggcctctactctgcattcaattac

SEQ ID NO: 239 - DNA, 71 bp, Artificial Sequence
  Synthetic
gttcctggaactggaatctctttccatagaatgttctaaaccatcctgcggcctctactctgcattcaatt

SEQ ID NO: 240 - DNA, 71 bp, Artificial Sequence
  Synthetic
gggttcctggaactggaatctctttccatagaatgttctaaaccatcctgcggcctctactctgcattcaa

SEQ ID NO: 241 - DNA, 71 bp, Artificial Sequence
  Synthetic
gcaggttcctggaactggaatctctttccatagaatgttctaaaccatcctgcggcctctactctgcattc

SEQ ID NO: 242 - DNA, 71 bp, Artificial Sequence
  Synthetic
gaccaggttcctggaactggaatctctttccatagaatgttctaaaccatcctgcggcctctactctgcat

SEQ ID NO: 243 - DNA, 71 bp, Artificial Sequence
  Synthetic
ggtaccaggttcctggaactggaatctctttccatagaatgttctaaaccatcctgcggcctctactctgc

SEQ ID NO: 244 - DNA, 71 bp, Artificial Sequence
  Synthetic
gatgtaccaggttcctggaactggaatctctttccatagaatgttctaaaccatcctgcggcctctactct

SEQ ID NO: 245 - DNA, 71 bp, Artificial Sequence
  Synthetic
ggtatgtaccaggttcctggaactggaatctctttccatagaatgttctaaaccatcctgcggcctctact

SEQ ID NO: 246 - DNA, 71 bp, Artificial Sequence
  Synthetic
gacgtatgtaccaggttcctggaactggaatctctttccatagaatgttctaaaccatcctgcggcctcta

SEQ ID NO: 247 - DNA, 71 bp, Artificial Sequence
  Synthetic
gacacgtatgtaccaggttcctggaactggaatctctttccatagaatgttctaaaccatcctgcggcctc

SEQ ID NO: 248 - DNA, 71 bp, Artificial Sequence
  Synthetic
gcaacacgtatgtaccaggttcctggaactggaatctctttccatagaatgttctaaaccatcctgcggcc

SEQ ID NO: 249 - DNA, 71 bp, Artificial Sequence
  Synthetic
gcccaacacgtatgtaccaggttcctggaactggaatctctttccatagaatgttctaaaccatcctgcgg

SEQ ID NO: 250 - DNA, 71 bp, Artificial Sequence
  Synthetic
ggacccaacacgtatgtaccaggttcctggaactggaatctctttccatagaatgttctaaaccatcctgc

SEQ ID NO: 251 - DNA, 71 bp, Artificial Sequence
  Synthetic
gttgacccaacacgtatgtaccaggttcctggaactggaatctctttccatagaatgttctaaaccatcct

SEQ ID NO: 252 - DNA, 71 bp, Artificial Sequence
  Synthetic
gccttgacccaacacgtatgtaccaggttcctggaactggaatctctttccatagaatgttctaaaccatc

SEQ ID NO: 253 - DNA, 71 bp, Artificial Sequence
  Synthetic
gttccttgacccaacacgtatgtaccaggttcctggaactggaatctctttccatagaatgttctaaacca

SEQ ID NO: 254 - DNA, 85 bp, Artificial Sequence
  Synthetic
gcatcctgcggcctctactctgcattcaattacatactgacacattcggcaacatgtttttcctggtttattttcacacagtcca

SEQ ID NO: 255 - DNA, 85 bp, Artificial Sequence
  Synthetic
gaccatcctgcggcctctactctgcattcaattacatactgacacattcggcaacatgtttttcctggtttattttcacacagtc

SEQ ID NO: 256 - DNA, 85 bp, Artificial Sequence
  Synthetic
gaaaccatcctgcggcctctactctgcattcaattacatactgacacattcggcaacatgtttttcctggtttattttcacacag

SEQ ID NO: 257 - DNA, 85 bp, Artificial Sequence
  Synthetic
gctaaaccatcctgcggcctctactctgcattcaattacatactgacacattcggcaacatgtttttcctggtttattttcacac

SEQ ID NO: 258 - DNA, 85 bp, Artificial Sequence
  Synthetic
gttctaaaccatcctgcggcctctactctgcattcaattacatactgacacattcggcaacatgtttttcctggtttattttcac

SEQ ID NO: 259 - DNA, 85 bp, Artificial Sequence
  Synthetic
gtgttctaaaccatcctgcggcctctactctgcattcaattacatactgacacattcggcaacatgtttttcctggtttattttc

SEQ ID NO: 260 - DNA, 85 bp, Artificial Sequence
  Synthetic
gaatgttctaaaccatcctgcggcctctactctgcattcaattacatactgacacattcggcaacatgtttttcctggtttattt

SEQ ID NO: 261 - DNA, 85 bp, Artificial Sequence
  Synthetic
gagaatgttctaaaccatcctgcggcctctactctgcattcaattacatactgacacattcggcaacatgtttttcctggtttat

SEQ ID NO: 262 - DNA, 85 bp, Artificial Sequence
  Synthetic
gatagaatgttctaaaccatcctgcggcctctactctgcattcaattacatactgacacattcggcaacatgtttttcctggttt

SEQ ID NO: 263 - DNA, 85 bp, Artificial Sequence
  Synthetic
gccatagaatgttctaaaccatcctgcggcctctactctgcattcaattacatactgacacattcggcaacatgtttttcctggt

SEQ ID NO: 264 - DNA, 85 bp, Artificial Sequence
  Synthetic
gttccatagaatgttctaaaccatcctgcggcctctactctgcattcaattacatactgacacattcggcaacatgtttttcctg

SEQ ID NO: 265 - DNA, 85 bp, Artificial Sequence
  Synthetic
gctttccatagaatgttctaaaccatcctgcggcctctactctgcattcaattacatactgacacattcggcaacatgtttttcc

SEQ ID NO: 266 - DNA, 85 bp, Artificial Sequence
  Synthetic
gctctttccatagaatgttctaaaccatcctgcggcctctactctgcattcaattacatactgacacattcggcaacatgttttt

SEQ ID NO: 267 - DNA, 85 bp, Artificial Sequence
  Synthetic
gatctctttccatagaatgttctaaaccatcctgcggcctctactctgcattcaattacatactgacacattcggcaacatgttt

SEQ ID NO: 268 - DNA, 85 bp, Artificial Sequence
  Synthetic
ggaatctctttccatagaatgttctaaaccatcctgcggcctctactctgcattcaattacatactgacacattcggcaacatgt

SEQ ID NO: 269 - DNA, 85 bp, Artificial Sequence
  Synthetic
gtggaatctctttccatagaatgttctaaaccatcctgcggcctctactctgcattcaattacatactgacacattcggcaacat

SEQ ID NO: 270 - DNA, 85 bp, Artificial Sequence
  Synthetic
gactggaatctctttccatagaatgttctaaaccatcctgcggcctctactctgcattcaattacatactgacacattcggcaac

SEQ ID NO: 271 - DNA, 85 bp, Artificial Sequence
  Synthetic
ggaactggaatctctttccatagaatgttctaaaccatcctgcggcctctactctgcattcaattacatactgacacattcggca

SEQ ID NO: 272 - DNA, 85 bp, Artificial Sequence
  Synthetic
gtggaactggaatctctttccatagaatgttctaaaccatcctgcggcctctactctgcattcaattacatactgacacattcgg

SEQ ID NO: 273 - DNA, 85 bp, Artificial Sequence
  Synthetic
gcctggaactggaatctctttccatagaatgttctaaaccatcctgcggcctctactctgcattcaattacatactgacacattc

SEQ ID NO: 274 - DNA, 85 bp, Artificial Sequence
  Synthetic
gttcctggaactggaatctctttccatagaatgttctaaaccatcctgcggcctctactctgcattcaattacatactgacacat

SEQ ID NO: 275 - DNA, 85 bp, Artificial Sequence
  Synthetic
gggttcctggaactggaatctctttccatagaatgttctaaaccatcctgcggcctctactctgcattcaattacatactgacac

SEQ ID NO: 276 - DNA, 85 bp, Artificial Sequence
  Synthetic
gcaggttcctggaactggaatctctttccatagaatgttctaaaccatcctgcggcctctactctgcattcaattacatactgac

SEQ ID NO: 277 - DNA, 85 bp, Artificial Sequence
  Synthetic
gaccaggttcctggaactggaatctctttccatagaatgttctaaaccatcctgcggcctctactctgcattcaattacatactg

SEQ ID NO: 278 - DNA, 85 bp, Artificial Sequence
  Synthetic
ggtaccaggttcctggaactggaatctctttccatagaatgttctaaaccatcctgcggcctctactctgcattcaattacatac

SEQ ID NO: 279 - DNA, 85 bp, Artificial Sequence
  Synthetic
gatgtaccaggttcctggaactggaatctctttccatagaatgttctaaaccatcctgcggcctctactctgcattcaattacat

SEQ ID NO: 280 - DNA, 85 bp, Artificial Sequence
  Synthetic
ggtatgtaccaggttcctggaactggaatctctttccatagaatgttctaaaccatcctgcggcctctactctgcattcaattac

SEQ ID NO: 281 - DNA, 85 bp, Artificial Sequence
  Synthetic
gacgtatgtaccaggttcctggaactggaatctctttccatagaatgttctaaaccatcctgcggcctctactctgcattcaatt

SEQ ID NO: 282 - DNA, 85 bp, Artificial Sequence
  Synthetic
gacacgtatgtaccaggttcctggaactggaatctctttccatagaatgttctaaaccatcctgcggcctctactctgcattcaa

SEQ ID NO: 283 - DNA, 85 bp, Artificial Sequence
  Synthetic
gcaacacgtatgtaccaggttcctggaactggaatctctttccatagaatgttctaaaccatcctgcggcctctactctgcattc

SEQ ID NO: 284 - DNA, 85 bp, Artificial Sequence
  Synthetic
gcccaacacgtatgtaccaggttcctggaactggaatctctttccatagaatgttctaaaccatcctgcggcctctactctgcat

SEQ ID NO: 285 - DNA, 85 bp, Artificial Sequence
  Synthetic
ggacccaacacgtatgtaccaggttcctggaactggaatctctttccatagaatgttctaaaccatcctgcggcctctactctgc

SEQ ID NO: 286 - DNA, 85 bp, Artificial Sequence
  Synthetic
gttgacccaacacgtatgtaccaggttcctggaactggaatctctttccatagaatgttctaaaccatcctgcggcctctactct

SEQ ID NO: 287 - DNA, 85 bp, Artificial Sequence
  Synthetic
gccttgacccaacacgtatgtaccaggttcctggaactggaatctctttccatagaatgttctaaaccatcctgcggcctctact

SEQ ID NO: 288 - DNA, 85 bp, Artificial Sequence
  Synthetic
gttccttgacccaacacgtatgtaccaggttcctggaactggaatctctttccatagaatgttctaaaccatcctgcggcctcta

SEQ ID NO: 289 - DNA, 85 bp, Artificial Sequence
  Synthetic
gggttccttgacccaacacgtatgtaccaggttcctggaactggaatctctttccatagaatgttctaaaccatcctgcggcctc

SEQ ID NO: 290 - DNA, 85 bp, Artificial Sequence
  Synthetic
gttggttccttgacccaacacgtatgtaccaggttcctggaactggaatctctttccatagaatgttctaaaccatcctgcggcc

SEQ ID NO: 291 - DNA, 85 bp, Artificial Sequence
  Synthetic
gccttggttccttgacccaacacgtatgtaccaggttcctggaactggaatctctttccatagaatgttctaaaccatcctgcgg

SEQ ID NO: 292 - DNA, 85 bp, Artificial Sequence
  Synthetic
ggcccttggttccttgacccaacacgtatgtaccaggttcctggaactggaatctctttccatagaatgttctaaaccatcctgc

SEQ ID NO: 293 - DNA, 85 bp, Artificial Sequence
  Synthetic
gccgcccttggttccttgacccaacacgtatgtaccaggttcctggaactggaatctctttccatagaatgttctaaaccatcct

SEQ ID NO: 294 - DNA, 85 bp, Artificial Sequence
  Synthetic
gcgccgcccttggttccttgacccaacacgtatgtaccaggttcctggaactggaatctctttccatagaatgttctaaaccatc

SEQ ID NO: 295 - DNA, 85 bp, Artificial Sequence
  Synthetic
ggtcgccgcccttggttccttgacccaacacgtatgtaccaggttcctggaactggaatctctttccatagaatgttctaaacca

SEQ ID NO: 296 - protein, 7 aa, Artificial Sequence
  Synthetic
GSGGGGS

SEQ ID NO: 297 - protein, 5 aa, Artificial Sequence
  Synthetic
EAAAK

SEQ ID NO: 298 - protein, 18 aa, Artificial Sequence
  Synthetic
GGSGGSGGSGGSGGSGGS

SEQ ID NO: 299 - protein, 16 aa, Artificial Sequence
  Synthetic
SGSETPGTSESATPES

SEQ ID NO: 300 - RNA, 28 nt, Artificial Sequence
  Synthetic
gccagcuuuccgggcauuggcuuccauc

SEQ ID NO: 301 - DNA, 28 bp, Artificial Sequence
  Synthetic
gccagctttccgggcattggcttccatc

SEQ ID NO: 302 - DNA, 28 bp, Artificial Sequence
  Synthetic
acccaggaatctcaggaatgtcgacgat

SEQ ID NO: 303 - DNA, 28 bp, Artificial Sequence
  Synthetic
agggttttcccagtcacgacgttgtaaa

SEQ ID NO: 304 - DNA, 30 bp, Artificial Sequence
  Synthetic
gggcattggcttccatctctttgagcacct

SEQ ID NO: 305 - RNA, 30 nt, Artificial Sequence
  Synthetic
gugcagccagcuuuccgggcauuggcuucc

SEQ ID NO: 306 - RNA, 30 nt, Artificial Sequence
  Synthetic
gcagccagcuuuccgggcauuggcuuccau

SEQ ID NO: 307 - RNA, 30 nt, Artificial Sequence
  Synthetic
ggcuuccaucucuuugagcaccuccagcgg

SEQ ID NO: 308 - RNA, 30 nt, Artificial Sequence
  Synthetic
ggaaugucgacgaucgccucgccuaugccg

SEQ ID NO: 309 - RNA, 30 nt, Artificial Sequence
  Synthetic
gaaugucgacgaucgccucgccuaugccgc

SEQ ID NO: 310 - RNA, 30 nt, Artificial Sequence
  Synthetic
gaccugugcgaugaacugcuccaugggcuc

SEQ ID NO: 311 - RNA, 30 nt, Artificial Sequence
  Synthetic
guguggcagcguccugggaugaacuucuuc

SEQ ID NO: 312 - RNA, 30 nt, Artificial Sequence
  Synthetic
guggcagcguccugggaugaacuucuucau

SEQ ID NO: 313 - RNA, 30 nt, Artificial Sequence
  Synthetic
gcuucuugccgggcaacuucccgcggucag

SEQ ID NO: 314 - RNA, 31 nt, Artificial Sequence
  Synthetic
gcaggguuuucccagucacgacguuguaaaa

SEQ ID NO: 315 - RNA, 31 nt, Artificial Sequence; identical to SEQ ID NO: 314
  Synthetic

SEQ ID NO: 316 - RNA, 28 nt, Artificial Sequence
  Synthetic
acccaggaaucucaggaaugucgacgau

SEQ ID NO: 317 - DNA, 21 bp, Artificial Sequence
  Synthetic
cagctttccgggcattggctt

SEQ ID NO: 318 - RNA, 30 nt, Artificial Sequence
  Synthetic
ccgcuggaggugcucaaagagauggaagcc

SEQ ID NO: 319 - DNA, 28 bp, Artificial Sequence
  Synthetic
gccagctttccgggcattggcttccatc

SEQ ID NO: 320 - DNA, 28 bp, Artificial Sequence
  Synthetic
acccaggaatctcaggaatgtcgacgat

SEQ ID NO: 321 - DNA, 30 bp, Artificial Sequence; identical to SEQ ID NO: 304
  Synthetic

SEQ ID NO: 322 - RNA, 30 nt, Artificial Sequence; identical to SEQ ID NO: 309
  Synthetic

SEQ ID NO: 323 - DNA, 28 bp, Artificial Sequence
  Synthetic
caaggcactcttgcctacgccaccagct

SEQ ID NO: 324 - DNA, 28 bp, Artificial Sequence
  Synthetic
tcatattcgtccacaaaatgattctgaa

SEQ ID NO: 325 - DNA, 28 bp, Artificial Sequence
  Synthetic
attatttatggcaaatacacaaagaaag

SEQ ID NO: 326 - DNA, 28 bp, Artificial Sequence
  Synthetic
gaatatcttcaaatgatttagtattatt

SEQ ID NO: 327 - DNA, 28 bp, Artificial Sequence
  Synthetic
accataggtacatcttcagagtccttaa

SEQ ID NO: 328 - DNA, 30 bp, Artificial Sequence
  Synthetic
gtcaaggcactcttgcctacgccaccagct

SEQ ID NO: 329 - DNA, 30 bp, Artificial Sequence
  Synthetic
gatcatattcgtccacaaaatgattctgaa

SEQ ID NO: 330 - DNA, 30 bp, Artificial Sequence
  Synthetic
gtattatttatggcaaatacacaaagaaag

SEQ ID NO: 331 - DNA, 30 bp, Artificial Sequence
  Synthetic
gtgaatatcttcaaatgatttagtattatt

SEQ ID NO: 332 - DNA, 30 bp, Artificial Sequence
  Synthetic
ggaccataggtacatcttcagagtccttaa

SEQ ID NO: 333 - DNA, 50 bp, Artificial Sequence
  Synthetic
aagagtgccttgacgatacagcctcgaggctgtatcgtcaaggcactctt

SEQ ID NO: 334 - DNA, 48 bp, Artificial Sequence
  Synthetic
aatcattttgtggacgaatatctcgagatattcgtccacaaaatgatt

SEQ ID NO: 335 - DNA, 48 bp, Artificial Sequence
  Synthetic
aaataatactaaatcatttgactcgagtcaaatgatttagtattattt

SEQ ID NO: 336 - DNA, 48 bp, Artificial Sequence
  Synthetic
aataatactaaatcatttgaactcgagttcaaatgatttagtattatt

SEQ ID NO: 337 - DNA, 48 bp, Artificial Sequence
  Synthetic
aaggactctgaagatgtacctctcgagaggtacatcttcagagtcctt

SEQ ID NO: 338 - DNA, 30 bp, Artificial Sequence
  Synthetic
gagatcagggcaaacagaactttgactccc

SEQ ID NO: 339 - DNA, 30 bp, Artificial Sequence
  Synthetic
ggatgcagatcagggcaaacagaactttga

SEQ ID NO: 340 - DNA, 30 bp, Artificial Sequence
  Synthetic
gcacagcgatgcagatcagggcaaacagaa

SEQ ID NO: 341 - DNA, 30 bp, Artificial Sequence
  Synthetic
gctcggccacagcgatgcagatcagggcaa

SEQ ID NO: 342 - DNA, 30 bp, Artificial Sequence
  Synthetic
ggggcttggcctcggccacagcgatgcaga

SEQ ID NO: 343 - DNA, 30 bp, Artificial Sequence
  Synthetic
gtgggcttggcctcggccacagcgatgcag

SEQ ID NO: 344 - DNA, 30 bp, Artificial Sequence
  Synthetic
gtctcggtgggcttggcctcggccacagcg

SEQ ID NO: 345 - DNA, 30 bp, Artificial Sequence
  Synthetic
gttcgttgttctcggtgggcttggcctcgg

SEQ ID NO: 346 - DNA, 30 bp, Artificial Sequence
  Synthetic
ggaagtcttcgttgttctcggtgggcttgg

SEQ ID NO: 347 - DNA, 30 bp, Artificial Sequence
  Synthetic
gatgttgaagtcttcgttgttctcggtggg

SEQ ID NO: 348 - DNA, 30 bp, Artificial Sequence
  Synthetic
gcggccacgatgttgaagtcttcgttgttc

SEQ ID NO: 349 - DNA, 30 bp, Artificial Sequence
  Synthetic
gtggccacggccacgatgttgaagtcttcg

SEQ ID NO: 350 - DNA, 30 bp, Artificial Sequence
  Synthetic
ggttgctggccacggccacgatgttgaagt

SEQ ID NO: 351 - DNA, 30 bp, Artificial Sequence
  Synthetic
gtcgcgaagttgctggccacggccacgatg

SEQ ID NO: 352 - DNA, 30 bp, Artificial Sequence
  Synthetic
gccgtggtcgcgaagttgctggccacggcc

SEQ ID NO: 353 - DNA, 30 bp, Artificial Sequence
  Synthetic
gcgagatccgtggtcgcgaagttgctggcc

SEQ ID NO: 354 - DNA, 30 bp, Artificial Sequence
  Synthetic
gcagcatcgagatccgtggtcgcgaagttg

SEQ ID NO: 355 - DNA, 30 bp, Artificial Sequence
  Synthetic
gggtcagcatcgagatccgtggtcgcgaag

SEQ ID NO: 356 - DNA, 30 bp, Artificial Sequence
  Synthetic
gcttcccgcggtcagcatcgagatccgtgg

SEQ ID NO: 357 - DNA, 30 bp, Artificial Sequence
  Synthetic
ggggcaacttcccgcggtcagcatcgagat

SEQ ID NO: 358 - DNA, 30 bp, Artificial Sequence
  Synthetic
gtcttgccgggcaacttcccgcggtcagca

SEQ ID NO: 359 - DNA, 30 bp, Artificial Sequence
  Synthetic
ggcagcttcttgccgggcaacttcccgcgg

SEQ ID NO: 360 - DNA, 30 bp, Artificial Sequence
  Synthetic
gccagcggcagcttcttgccgggcaacttc

SEQ ID NO: 361 - DNA, 30 bp, Artificial Sequence
  Synthetic
gcacctccagcggcagcttcttgccgggca

SEQ ID NO: 362 - DNA, 30 bp, Artificial Sequence
  Synthetic
gctttgagcacctccagcggcagcttcttg

SEQ ID NO: 363 - DNA, 30 bp, Artificial Sequence
  Synthetic
gcatctctttgagcacctccagcggcagct

SEQ ID NO: 364 - DNA, 30 bp, Artificial Sequence
  Synthetic
gtccatctctttgagcacctccagcggcag

SEQ ID NO: 365 - DNA, 30 bp, Artificial Sequence; identical to SEQ ID NO: 304
  Synthetic

SEQ ID NO: 366 - DNA, 30 bp, Artificial Sequence
  Synthetic
gtccgggcattggcttccatctctttgagc

SEQ ID NO: 367 - DNA, 30 bp, Artificial Sequence
  Synthetic
ggccagctttccgggcattggcttccatct

SEQ ID NO: 368 - DNA, 30 bp, Artificial Sequence
  Synthetic
gggtgcagccagctttccgggcattggctt

SEQ ID NO: 369 - DNA, 30 bp, Artificial Sequence
  Synthetic
gagcccctggtgcagccagctttccgggca

SEQ ID NO: 370 - DNA, 30 bp, Artificial Sequence
  Synthetic
gatcagacagcccctggtgcagccagcttt

SEQ ID NO: 371 - DNA, 30 bp, Artificial Sequence
  Synthetic
ggcagatcagacagcccctggtgcagccag

SEQ ID NO: 372 - DNA, 30 bp, Artificial Sequence
  Synthetic
gacaggcagatcagacagcccctggtgcag

SEQ ID NO: 373 - DNA, 30 bp, Artificial Sequence
  Synthetic
gtgatgtgggacaggcagatcagacagccc

SEQ ID NO: 374 - DNA, 30 bp, Artificial Sequence
  Synthetic
gacttgatgtgggacaggcagatcagacag

SEQ ID NO: 375 - DNA, 30 bp, Artificial Sequence
  Synthetic
ggggcgtgcacttgatgtgggacaggcaga

SEQ ID NO: 376 - DNA, 30 bp, Artificial Sequence
  Synthetic
gcttcatcttgggcgtgcacttgatgtggg

SEQ ID NO: 377 - DNA, 30 bp, Artificial Sequence
  Synthetic
gtgaacttcttcatcttgggcgtgcacttg

SEQ ID NO: 378 - DNA, 30 bp, Artificial Sequence
  Synthetic
gggatgaacttcttcatcttgggcgtgcac

SEQ ID NO: 379 - DNA, 30 bp, Artificial Sequence
  Synthetic
gtgggatgaacttcttcatcttgggcgtgc

SEQ ID NO: 380 - DNA, 30 bp, Artificial Sequence
  Synthetic
gggcagcgtcctgggatgaacttcttcatc

SEQ ID NO: 381 - DNA, 30 bp, Artificial Sequence
  Synthetic
gggtgtggcagcgtcctgggatgaacttct

SEQ ID NO: 382 - DNA, 30 bp, Artificial Sequence
  Synthetic
gttcgtaggtgtggcagcgtcctgggatga

SEQ ID NO: 383 - DNA, 30 bp, Artificial Sequence
  Synthetic
gcgccttcgtaggtgtggcagcgtcctggg

SEQ ID NO: 384 - DNA, 30 bp, Artificial Sequence
  Synthetic
gtctttgtcgccttcgtaggtgtggcagcg

SEQ ID NO: 385 - DNA, 30 bp, Artificial Sequence
  Synthetic
gctttgtcgccttcgtaggtgtggcagcgt

SEQ ID NO: 386 - DNA, 30 bp, Artificial Sequence
  Synthetic
gtgccgccctgtgcggactctttgtcgcct

SEQ ID NO: 387 - DNA, 30 bp, Artificial Sequence
  Synthetic
gtatgccgccctgtgcggactctttgtcgc

SEQ ID NO: 388 - DNA, 30 bp, Artificial Sequence
  Synthetic
gcctcgcctatgccgccctgtgcggactct

SEQ ID NO: 389 - DNA, 30 bp, Artificial Sequence
  Synthetic
ggatcgcctcgcctatgccgccctgtgcgg

SEQ ID NO: 390 - DNA, 30 bp, Artificial Sequence
  Synthetic
gatgtcgacgatcgcctcgcctatgccgcc

SEQ ID NO: 391 - DNA, 30 bp, Artificial Sequence
  Synthetic
gcaggaatgtcgacgatcgcctcgcctatg

SEQ ID NO: 392 - DNA, 30 bp, Artificial Sequence
  Synthetic
gaatctcaggaatgtcgacgatcgcctcgc

SEQ ID NO: 393 - DNA, 30 bp, Artificial Sequence
  Synthetic
gcccaggaatctcaggaatgtcgacgatcg

SEQ ID NO: 394 - DNA, 30 bp, Artificial Sequence
  Synthetic
gccttgaacccaggaatctcaggaatgtcg

SEQ ID NO: 395 - DNA, 30 bp, Artificial Sequence
  Synthetic
gccaagtccttgaacccaggaatctcagga

SEQ ID NO: 396 - DNA, 30 bp, Artificial Sequence
  Synthetic
gtgggctccaagtccttgaacccaggaatc

SEQ ID NO: 397 - DNA, 30 bp, Artificial Sequence
  Synthetic
gccatgggctccaagtccttgaacccagga

SEQ ID NO: 398 - DNA, 30 bp, Artificial Sequence
  Synthetic
ggaactgctccatgggctccaagtccttga

SEQ ID NO: 399 - DNA, 30 bp, Artificial Sequence
  Synthetic
gtgcgatgaactgctccatgggctccaagt

SEQ ID NO: 400 - DNA, 30 bp, Artificial Sequence
  Synthetic
ggacctgtgcgatgaactgctccatgggct

SEQ ID NO: 401 - DNA, 30 bp, Artificial Sequence
  Synthetic
gacagatcgacctgtgcgatgaactgctcc

SEQ ID NO: 402 - DNA, 30 bp, Artificial Sequence
  Synthetic
gacacacagatcgacctgtgcgatgaactg

SEQ ID NO: 403 - DNA, 30 bp, Artificial Sequence
  Synthetic
gtgcagtccacacacagatcgacctgtgcg

SEQ ID NO: 404 - DNA, 30 bp, Artificial Sequence
  Synthetic
gccagttgtgcagtccacacacagatcgac

SEQ ID NO: 405 - DNA, 30 bp, Artificial Sequence
  Synthetic
gggcagccagttgtgcagtccacacacaga

SEQ ID NO: 406 - DNA, 30 bp, Artificial Sequence
  Synthetic
gtttgaggcagccagttgtgcagtccacac

SEQ ID NO: 407 - DNA, 30 bp, Artificial Sequence
  Synthetic
gaagccctttgaggcagccagttgtgcagt

SEQ ID NO: 408 - DNA, 30 bp, Artificial Sequence
  Synthetic
gcacgttggcaagccctttgaggcagccag

SEQ ID NO: 409 - DNA, 30 bp, Artificial Sequence
  Synthetic
gactgcacgttggcaagccctttgaggcag

SEQ ID NO: 410 - DNA, 30 bp, Artificial Sequence
  Synthetic
gggtcagaacactgcacgttggcaagccct

SEQ ID NO: 411 - DNA, 30 bp, Artificial Sequence
  Synthetic
gcaggtcagaacactgcacgttggcaagcc

SEQ ID NO: 412 - DNA, 30 bp, Artificial Sequence
  Synthetic
gagcaggtcagaacactgcacgttggcaag

SEQ ID NO: 413 - DNA, 30 bp, Artificial Sequence
  Synthetic
ggccacttcttgagcaggtcagaacactgc

SEQ ID NO: 414 - DNA, 30 bp, Artificial Sequence
  Synthetic
gcggcagccacttcttgagcaggtcagaac

SEQ ID NO: 415 - DNA, 30 bp, Artificial Sequence
  Synthetic
gtgcggcagccacttcttgagcaggtcaga

SEQ ID NO: 416 - DNA, 30 bp, Artificial Sequence
  Synthetic
gagcgttgcggcagccacttcttgagcagg

SEQ ID NO: 417 - DNA, 30 bp, Artificial Sequence
  Synthetic
gaaaggtcgcacagcgttgcggcagccact

SEQ ID NO: 418 - DNA, 30 bp, Artificial Sequence
  Synthetic
gctggcaaaggtcgcacagcgttgcggcag

SEQ ID NO: 419 - DNA, 30 bp, Artificial Sequence
  Synthetic
gggcaaaggtcgcacagcgttgcggcagcc

SEQ ID NO: 420 - DNA, 30 bp, Artificial Sequence
  Synthetic
gtggatcttgctggcaaaggtcgcacagcg

SEQ ID NO: 421 - DNA, 30 bp, Artificial Sequence
  Synthetic
gcacctggccctggatcttgctggcaaagg

SEQ ID NO: 422 - DNA, 30 bp, Artificial Sequence
  Synthetic
gtggccctggatcttgctggcaaaggtcgc

SEQ ID NO: 423 - DNA, 30 bp, Artificial Sequence
  Synthetic
gtgatcttgtccacctggccctggatcttg

SEQ ID NO: 424 - DNA, 30 bp, Artificial Sequence
  Synthetic
gccccttgatcttgtccacctggccctgga

SEQ ID NO: 425 - DNA, 30 bp, Artificial Sequence
  Synthetic
gcccttgatcttgtccacctggccctggat

SEQ ID NO: 426 - DNA, 30 bp, Artificial Sequence
  Synthetic
gccttgatcttgtccacctggccctggatc

SEQ ID NO: 427 - DNA, 30 bp, Artificial Sequence
  Synthetic
ggcaaaggtcgcacagcgttgcggcagcca

SEQ ID NO: 428 - DNA, 30 bp, Artificial Sequence
  Synthetic
gcaaaggtcgcacagcgttgcggcagccac

SEQ ID NO: 429 - DNA, 30 bp, Artificial Sequence
  Synthetic
gaaggtcgcacagcgttgcggcagccactt

SEQ ID NO: 430 - DNA, 30 bp, Artificial Sequence
  Synthetic
gaggtcgcacagcgttgcggcagccacttc

SEQ ID NO: 431 - DNA, 31 bp, Artificial Sequence
  Synthetic
ggtaatgcctggcttgtcgacgcatagtctg

SEQ ID NO: 432 - DNA, 31 bp, Artificial Sequence
  Synthetic
gggaaccttggccgttataaagtctgaccag

SEQ ID NO: 433 - DNA, 31 bp, Artificial Sequence
  Synthetic
ggagggtgagaatttagaaccaagattgttg

SEQ ID NO: 434 - DNA, 30 bp, Artificial Sequence
  Synthetic
gagtcctggcaatgaacagtggcgcagtag

SEQ ID NO: 435 - DNA, 30 bp, Artificial Sequence
  Synthetic
gggtgccacagctgctatcaatacattctc

SEQ ID NO: 436 - DNA, 30 bp, Artificial Sequence
  Synthetic
gttacatactgacacattcggcaacatgtt

SEQ ID NO: 437 - DNA, 30 bp, Artificial Sequence
  Synthetic
gtatgtaccaggttcctggaactggaatct

SEQ ID NO: 438 - DNA, 30 bp, Artificial Sequence
  Synthetic
gccttggttccatccaggttctccagggtg

SEQ ID NO: 439 - DNA, 30 bp, Artificial Sequence
  Synthetic
gcagtgatgggattctcagtagcttgagcg

SEQ ID NO: 440 - DNA, 30 bp, Artificial Sequence
  Synthetic
gagcctggcatctcaacaacagcgatggtg

SEQ ID NO: 441 - DNA, 30 bp, Artificial Sequence
  Synthetic
gtgtctggggcgattcttacagatcttcct

SEQ ID NO: 442 - DNA, 30 bp, Artificial Sequence
  Synthetic
gctggatctgaagtgaagtctgtatcttcc

SEQ ID NO: 443 - DNA, 30 bp, Artificial Sequence
  Synthetic
ggcaacgtcatcaggatttccatagagtgg

SEQ ID NO: 444 - DNA, 30 bp, Artificial Sequence
  Synthetic
gaggcgcaggagatggtgtagtagtagaag

SEQ ID NO: 445 - DNA, 30 bp, Artificial Sequence
  Synthetic
gagggaccctggaattggtatcttgctttg

SEQ ID NO: 446 - DNA, 30 bp, Artificial Sequence
  Synthetic
ggtaagagtcaacattcctgtgtgaaacct

SEQ ID NO: 447 - DNA, 30 bp, Artificial Sequence
  Synthetic
gaccagaatctgttttccatcaacaatgag

SEQ ID NO: 448 - DNA, 30 bp, Artificial Sequence
  Synthetic
gatggctgtagtcagtatgtcaccatcttg

SEQ ID NO: 449 - DNA, 30 bp, Artificial Sequence
  Synthetic
gtaccatcgaatggatctctaatatgtacg

SEQ ID NO: 450 - DNA, 30 bp, Artificial Sequence
  Synthetic
gagatcacaggctccttcagcatcaaaaga

SEQ ID NO: 451 - DNA, 30 bp, Artificial Sequence
  Synthetic
gctttgaccggcgaagagactattgcagag

SEQ ID NO: 452 - DNA, 30 bp, Artificial Sequence
  Synthetic
gcccctcaggcaatactcgtacatgcatcg

SEQ ID NO: 453 - DNA, 30 bp, Artificial Sequence
  Synthetic
gctggtacttctagggtgtctccatgcttt

SEQ ID NO: 454 - DNA, 31 bp, Artificial Sequence; identical to SEQ ID NO: 431
  Synthetic

SEQ ID NO: 455 - DNA, 31 bp, Artificial Sequence; identical to SEQ ID NO: 432
  Synthetic

SEQ ID NO: 456 - DNA, 31 bp, Artificial Sequence; identical to SEQ ID NO: 433
  Synthetic

SEQ ID NO: 457 - DNA, 31 bp, Artificial Sequence; identical to SEQ ID NO: 179
  Synthetic

SEQ ID NO: 458 - DNA, 31 bp, Artificial Sequence; identical to SEQ ID NO: 180
  Synthetic

SEQ ID NO: 459 - DNA, 31 bp, Artificial Sequence; identical to SEQ ID NO: 181
  Synthetic

SEQ ID NO: 460 - DNA, 31 bp, Artificial Sequence; identical to SEQ ID NO: 182
  Synthetic

SEQ ID NO: 461 - DNA, 31 bp, Artificial Sequence; identical to SEQ ID NO: 183
  Synthetic

SEQ ID NO: 462 - DNA, 31 bp, Artificial Sequence; identical to SEQ ID NO: 184
  Synthetic

SEQ ID NO: 463 - DNA, 31 bp, Artificial Sequence; identical to SEQ ID NO: 185
  Synthetic

SEQ ID NO: 464 - DNA, 31 bp, Artificial Sequence; identical to SEQ ID NO: 186
  Synthetic

SEQ ID NO: 465 - DNA, 31 bp, Artificial Sequence; identical to SEQ ID NO: 187
  Synthetic

SEQ ID NO: 466 - DNA, 31 bp, Artificial Sequence; identical to SEQ ID NO: 188
  Synthetic

SEQ ID NO: 467 - DNA, 31 bp, Artificial Sequence; identical to SEQ ID NO: 189
  Synthetic

SEQ ID NO: 468 - DNA, 31 bp, Artificial Sequence; identical to SEQ ID NO: 190
  Synthetic

SEQ ID NO: 469 - DNA, 31 bp, Artificial Sequence; identical to SEQ ID NO: 191
  Synthetic

SEQ ID NO: 470 - DNA, 31 bp, Artificial Sequence; identical to SEQ ID NO: 192
  Synthetic

SEQ ID NO: 471 - DNA, 31 bp, Artificial Sequence; identical to SEQ ID NO: 193
  Synthetic

SEQ ID NO: 472 - DNA, 51 bp, Artificial Sequence; identical to SEQ ID NO: 194
  Synthetic

SEQ ID NO: 473 - DNA, 51 bp, Artificial Sequence; identical to SEQ ID NO: 195
  Synthetic

SEQ ID NO: 474 - DNA, 51 bp, Artificial Sequence; identical to SEQ ID NO: 196
  Synthetic

SEQ ID NO: 475 - DNA, 51 bp, Artificial Sequence; identical to SEQ ID NO: 197
  Synthetic

SEQ ID NO: 476 - DNA, 51 bp, Artificial Sequence; identical to SEQ ID NO: 198
  Synthetic

SEQ ID NO: 477 - DNA, 51 bp, Artificial Sequence; identical to SEQ ID NO: 199
  Synthetic

SEQ ID NO: 478 - DNA, 51 bp, Artificial Sequence; identical to SEQ ID NO: 200
  Synthetic

SEQ ID NO: 479 - DNA, 51 bp, Artificial Sequence; identical to SEQ ID NO: 201
  Synthetic

SEQ ID NO: 480 - DNA, 51 bp, Artificial Sequence; identical to SEQ ID NO: 202
  Synthetic

SEQ ID NO: 481 - DNA, 51 bp, Artificial Sequence; identical to SEQ ID NO: 203
  Synthetic

SEQ ID NO: 482 - DNA, 51 bp, Artificial Sequence; identical to SEQ ID NO: 204
  Synthetic

SEQ ID NO: 483 - DNA, 51 bp, Artificial Sequence; identical to SEQ ID NO: 205
  Synthetic

SEQ ID NO: 484 - DNA, 51 bp, Artificial Sequence; identical to SEQ ID NO: 206
  Synthetic

SEQ ID NO: 485 - DNA, 51 bp, Artificial Sequence; identical to SEQ ID NO: 207
  Synthetic

SEQ ID NO: 486 - DNA, 51 bp, Artificial Sequence; identical to SEQ ID NO: 208
  Synthetic

SEQ ID NO: 487 - DNA, 51 bp, Artificial Sequence; identical to SEQ ID NO: 209
  Synthetic

SEQ ID NO: 488 - DNA, 51 bp, Artificial Sequence; identical to SEQ ID NO: 210
  Synthetic

SEQ ID NO: 489 - DNA, 51 bp, Artificial Sequence; identical to SEQ ID NO: 211
  Synthetic

SEQ ID NO: 490 - DNA, 51 bp, Artificial Sequence; identical to SEQ ID NO: 212
  Synthetic

SEQ ID NO: 491 - DNA, 51 bp, Artificial Sequence; identical to SEQ ID NO: 213
  Synthetic

SEQ ID NO: 492 - DNA, 51 bp, Artificial Sequence; identical to SEQ ID NO: 214
  Synthetic

SEQ ID NO: 493 - DNA, 51 bp, Artificial Sequence; identical to SEQ ID NO: 215
  Synthetic

SEQ ID NO: 494 - DNA, 51 bp, Artificial Sequence; identical to SEQ ID NO: 216
  Synthetic

SEQ ID NO: 495 - DNA, 51 bp, Artificial Sequence; identical to SEQ ID NO: 217
  Synthetic

SEQ ID NO: 496 - DNA, 51 bp, Artificial Sequence; identical to SEQ ID NO: 218
  Synthetic

SEQ ID NO: 497 - DNA, 71 bp, Artificial Sequence; identical to SEQ ID NO: 219
  Synthetic

SEQ ID NO: 498 - DNA, 71 bp, Artificial Sequence; identical to SEQ ID NO: 220
  Synthetic

SEQ ID NO: 499 - DNA, 71 bp, Artificial Sequence; identical to SEQ ID NO: 221
  Synthetic

SEQ ID NO: 500 - DNA, 71 bp, Artificial Sequence; identical to SEQ ID NO: 222
  Synthetic

SEQ ID NO: 501 - DNA, 71 bp, Artificial Sequence; identical to SEQ ID NO: 223
  Synthetic

SEQ ID NO: 502 - DNA, 71 bp, Artificial Sequence; identical to SEQ ID NO: 224
  Synthetic

SEQ ID NO: 503 - DNA, 71 bp, Artificial Sequence; identical to SEQ ID NO: 225
  Synthetic

SEQ ID NO: 504 - DNA, 71 bp, Artificial Sequence; identical to SEQ ID NO: 226
  Synthetic

SEQ ID NO: 505 - DNA, 71 bp, Artificial Sequence; identical to SEQ ID NO: 227
  Synthetic

SEQ ID NO: 506 - DNA, 71 bp, Artificial Sequence; identical to SEQ ID NO: 228
  Synthetic

SEQ ID NO: 507 - DNA, 71 bp, Artificial Sequence; identical to SEQ ID NO: 229
  Synthetic

SEQ ID NO: 508 - DNA, 71 bp, Artificial Sequence; identical to SEQ ID NO: 230
  Synthetic

SEQ ID NO: 509 - DNA, 71 bp, Artificial Sequence; identical to SEQ ID NO: 231
  Synthetic

SEQ ID NO: 510 - DNA, 71 bp, Artificial Sequence; identical to SEQ ID NO: 232
  Synthetic

SEQ ID NO: 511 - DNA, 71 bp, Artificial Sequence; identical to SEQ ID NO: 233
  Synthetic

SEQ ID NO: 512 - DNA, 71 bp, Artificial Sequence; identical to SEQ ID NO: 234
  Synthetic

SEQ ID NO: 513 - DNA, 71 bp, Artificial Sequence; identical to SEQ ID NO: 235
  Synthetic

SEQ ID NO: 514 - DNA, 71 bp, Artificial Sequence; identical to SEQ ID NO: 236
  Synthetic

SEQ ID NO: 515 - DNA, 71 bp, Artificial Sequence; identical to SEQ ID NO: 237
  Synthetic

SEQ ID NO: 516 - DNA, 71 bp, Artificial Sequence; identical to SEQ ID NO: 238
  Synthetic

SEQ ID NO: 517 - DNA, 71 bp, Artificial Sequence; identical to SEQ ID NO: 239
  Synthetic

SEQ ID NO: 518 - DNA, 71 bp, Artificial Sequence; identical to SEQ ID NO: 240
  Synthetic

SEQ ID NO: 519 - DNA, 71 bp, Artificial Sequence; identical to SEQ ID NO: 241
  Synthetic

SEQ ID NO: 520 - DNA, 71 bp, Artificial Sequence; identical to SEQ ID NO: 242
  Synthetic

SEQ ID NO: 521 - DNA, 71 bp, Artificial Sequence; identical to SEQ ID NO: 243
  Synthetic

SEQ ID NO: 522 - DNA, 71 bp, Artificial Sequence; identical to SEQ ID NO: 244
  Synthetic

SEQ ID NO: 523 - DNA, 71 bp, Artificial Sequence; identical to SEQ ID NO: 245
  Synthetic

SEQ ID NO: 524 - DNA, 71 bp, Artificial Sequence; identical to SEQ ID NO: 246
  Synthetic

SEQ ID NO: 525 - DNA, 71 bp, Artificial Sequence; identical to SEQ ID NO: 247
  Synthetic

SEQ ID NO: 526 - DNA, 71 bp, Artificial Sequence; identical to SEQ ID NO: 248
  Synthetic

SEQ ID NO: 527 - DNA, 71 bp, Artificial Sequence; identical to SEQ ID NO: 249
  Synthetic

SEQ ID NO: 528 - DNA, 71 bp, Artificial Sequence; identical to SEQ ID NO: 250
  Synthetic

SEQ ID NO: 529 - DNA, 71 bp, Artificial Sequence; identical to SEQ ID NO: 251
  Synthetic

SEQ ID NO: 530 - DNA, 71 bp, Artificial Sequence; identical to SEQ ID NO: 252
  Synthetic

SEQ ID NO: 531 - DNA, 71 bp, Artificial Sequence; identical to SEQ ID NO: 253
  Synthetic

SEQ ID NO: 532 - DNA, 85 bp, Artificial Sequence; identical to SEQ ID NO: 254
  Synthetic

SEQ ID NO: 533 - DNA, 85 bp, Artificial Sequence; identical to SEQ ID NO: 255
  Synthetic

SEQ ID NO: 534 - DNA, 85 bp, Artificial Sequence; identical to SEQ ID NO: 256
  Synthetic

SEQ ID NO: 535 - DNA, 85 bp, Artificial Sequence; identical to SEQ ID NO: 257
  Synthetic

SEQ ID NO: 536 - DNA, 85 bp, Artificial Sequence; identical to SEQ ID NO: 258
  Synthetic

SEQ ID NO: 537 - DNA, 85 bp, Artificial Sequence; identical to SEQ ID NO: 259
  Synthetic

SEQ ID NO: 538 - DNA, 85 bp, Artificial Sequence; identical to SEQ ID NO: 260
  Synthetic

SEQ ID NO: 539 - DNA, 85 bp, Artificial Sequence; identical to SEQ ID NO: 261
  Synthetic

SEQ ID NO: 540 - DNA, 85 bp, Artificial Sequence; identical to SEQ ID NO: 262
  Synthetic

SEQ ID NO: 541 - DNA, 85 bp, Artificial Sequence; identical to SEQ ID NO: 263
  Synthetic

SEQ ID NO: 542 - DNA, 85 bp, Artificial Sequence; identical to SEQ ID NO: 264
  Synthetic

SEQ ID NO: 543 - DNA, 85 bp, Artificial Sequence; identical to SEQ ID NO: 265
  Synthetic

SEQ ID NO: 544 - DNA, 85 bp, Artificial Sequence; identical to SEQ ID NO: 266
  Synthetic

SEQ ID NO: 545 - DNA, 85 bp, Artificial Sequence; identical to SEQ ID NO: 267
  Synthetic

SEQ ID NO: 546 - DNA, 85 bp, Artificial Sequence; identical to SEQ ID NO: 268
  Synthetic

SEQ ID NO: 547 - DNA, 85 bp, Artificial Sequence; identical to SEQ ID NO: 269
  Synthetic

SEQ ID NO: 548 - DNA, 85 bp, Artificial Sequence; identical to SEQ ID NO: 270
  Synthetic

SEQ ID NO: 549 - DNA, 85 bp, Artificial Sequence; identical to SEQ ID NO: 271
  Synthetic

SEQ ID NO: 550 - DNA, 85 bp, Artificial Sequence; identical to SEQ ID NO: 272
  Synthetic

SEQ ID NO: 551 - DNA, 85 bp, Artificial Sequence; identical to SEQ ID NO: 273
  Synthetic

SEQ ID NO: 552 - DNA, 85 bp, Artificial Sequence; identical to SEQ ID NO: 274
  Synthetic

SEQ ID NO: 553 - DNA, 85 bp, Artificial Sequence; identical to SEQ ID NO: 275
  Synthetic

SEQ ID NO: 554 - DNA, 85 bp, Artificial Sequence; identical to SEQ ID NO: 276
  Synthetic

SEQ ID NO: 555 - DNA, 85 bp, Artificial Sequence; identical to SEQ ID NO: 277
  Synthetic

SEQ ID NO: 556 - DNA, 85 bp, Artificial Sequence; identical to SEQ ID NO: 278
  Synthetic

SEQ ID NO: 557 - DNA, 85 bp, Artificial Sequence; identical to SEQ ID NO: 279
  Synthetic

SEQ ID NO: 558 - DNA, 85 bp, Artificial Sequence; identical to SEQ ID NO: 280
  Synthetic

SEQ ID NO: 559 - DNA, 85 bp, Artificial Sequence; identical to SEQ ID NO: 281
  Synthetic

SEQ ID NO: 560 - DNA, 85 bp, Artificial Sequence; identical to SEQ ID NO: 282
  Synthetic

SEQ ID NO: 561 - DNA, 85 bp, Artificial Sequence; identical to SEQ ID NO: 283
  Synthetic

SEQ ID NO: 562 - DNA, 85 bp, Artificial Sequence; identical to SEQ ID NO: 284
  Synthetic

SEQ ID NO: 563 - DNA, 85 bp, Artificial Sequence; identical to SEQ ID NO: 285
  Synthetic

SEQ ID NO: 564 - DNA, 85 bp, Artificial Sequence; identical to SEQ ID NO: 286
  Synthetic

SEQ ID NO: 565 - DNA, 85 bp, Artificial Sequence; identical to SEQ ID NO: 287
  Synthetic

SEQ ID NO: 566 - DNA, 85 bp, Artificial Sequence; identical to SEQ ID NO: 288
  Synthetic

SEQ ID NO: 567 - DNA, 85 bp, Artificial Sequence; identical to SEQ ID NO: 289
  Synthetic

SEQ ID NO: 568 - DNA, 85 bp, Artificial Sequence; identical to SEQ ID NO: 290
  Synthetic

SEQ ID NO: 569 - DNA, 85 bp, Artificial Sequence; identical to SEQ ID NO: 291
  Synthetic

SEQ ID NO: 570 - DNA, 85 bp, Artificial Sequence; identical to SEQ ID NO: 292
  Synthetic

SEQ ID NO: 571 - DNA, 85 bp, Artificial Sequence; identical to SEQ ID NO: 293
  Synthetic

SEQ ID NO: 572 - DNA, 85 bp, Artificial Sequence; identical to SEQ ID NO: 294
  Synthetic

SEQ ID NO: 573 - DNA, 85 bp, Artificial Sequence; identical to SEQ ID NO: 295
  Synthetic

SEQ ID NO: 574 - DNA, 30 bp, Artificial Sequence
  Synthetic
gtaatgcctggcttgtcgacgcatagtctg

SEQ ID NO: 575 - DNA, 51 bp, Artificial Sequence
  Synthetic
gaaaacgcaggttcctccagtttcgggagcagcgcacgtctccctgtagtc

SEQ ID NO: 576 - DNA, 51 bp, Artificial Sequence
  Synthetic
gacgcaggttcctctagcttcgggagcagcgcacgtctccctgtagtcaag

SEQ ID NO: 577 - DNA, 30 bp, Artificial Sequence; identical to SEQ ID NO: 574
  Synthetic

SEQ ID NO: 578 - DNA, 51 bp, Artificial Sequence; identical to SEQ ID NO: 202
  Synthetic

SEQ ID NO: 579 - DNA, 30 bp, Artificial Sequence; identical to SEQ ID NO: 574
  Synthetic

SEQ ID NO: 580 - DNA, 51 bp, Artificial Sequence
  Synthetic
gcaaggccacaaaattatccactgtttttggaacagtctttccgaagagac

SEQ ID NO: 581 - DNA, 51 bp, Artificial Sequence
  Synthetic
gcctgtagccaaggccacaaaattatccactgtttttggaacagtctttcc

SEQ ID NO: 582 - DNA, 51 bp, Artificial Sequence
  Synthetic
gctttctctcctgtagccaaggccacaaaattatccactgtttttggaaca

SEQ ID NO: 583 - DNA, 51 bp, Artificial Sequence
  Synthetic
ggccaaatcctttctctcctgtagccaaggccacaaaattatccactgttt

SEQ ID NO: 584 - DNA, 51 bp, Artificial Sequence
  Synthetic
gtttttgtagccaaatcctttctctcctgtagccaaggccacaaaattatc

SEQ ID NO: 585 - DNA, 51 bp, Artificial Sequence
  Synthetic
gatttgctgtttttgtagccaaatcctttctctcctgtagccaaggccaca

SEQ ID NO: 586 - DNA, 51 bp, Artificial Sequence
  Synthetic
gacgatggaatttgctgtttttgtagccaaatcctttctctcctgtagcca

SEQ ID NO: 587 - DNA, 51 bp, Artificial Sequence
  Synthetic
gatagaatgttctaaacgatcctgcggcctctactctgcattcaattacat

SEQ ID NO: 588 - DNA, 51 bp, Artificial Sequence
  Synthetic
gatagaatgttctaaacaatcctgcggcctctactctgcattcaattacat

SEQ ID NO: 589 - DNA, 51 bp, Artificial Sequence
  Synthetic
gatagaatgttctaaactatcctgcggcctctactctgcattcaattacat

SEQ ID NO: 590 - DNA, 51 bp, Artificial Sequence
  Synthetic
ggtcccacgcggcccacagctgcaccaggaagaagggtgcccagcacagca

SEQ ID NO: 591 - DNA, 51 bp, Artificial Sequence
  Synthetic
ggggtcccacgcggcccacagctgcaccaggaagaagggtgcccagcacag

SEQ ID NO: 592 - DNA, 51 bp, Artificial Sequence
  Synthetic
gccgggtcccacgcggcccacagctgcaccaggaagaagggtgcccagcac

SEQ ID NO: 593 - DNA, 51 bp, Artificial Sequence
  Synthetic
gggtgatgacatcccaggcgatcgtgtggcctccaggagcccagagcagga

SEQ ID NO: 594 - DNA, 51 bp, Artificial Sequence
  Synthetic
gagggtgatgacatcccaggcgatcgtgtggcctccaggagcccagagcag

SEQ ID NO: 595 - DNA, 51 bp, Artificial Sequence
  Synthetic
gatcagggtgatgacatcccaggcgatcgtgtggcctccaggagcccagag

SEQ ID NO: 596 - DNA, 51 bp, Artificial Sequence
  Synthetic
ggtggctccattcactccaatgctgagcacttccacagagtgggttaaagc

SEQ ID NO: 597 - DNA, 51 bp, Artificial Sequence
  Synthetic
gtttctaatatattttgccagactgatggactattctcaattaataatgat

SEQ ID NO: 598 - DNA, 51 bp, Artificial Sequence
  Synthetic
gagatgttgctgtggatccagtccacagccagcccgtcgggggcctggatg

SEQ ID NO: 599 - DNA, 51 bp, Artificial Sequence
  Synthetic
gcaggccggcccagctgccaggtgcacctgctcggagcatcgggccggatc

SEQ ID NO: 600 - DNA, 51 bp, Artificial Sequence
  Synthetic
gcaaagaacctctgggtccaagggtagaccaccagcagcctgcccagggcc

SEQ ID NO: 601 - DNA, 51 bp, Artificial Sequence
  Synthetic
gaagagaaacttagtttccagggctttggtagagggcaaaggttgatagca

SEQ ID NO: 602 - DNA, 51 bp, Artificial Sequence
  Synthetic
gtcagcctagtgcagagccactggtagttggtggttagagtttcaagttcc

SEQ ID NO: 603 - DNA, 51 bp, Artificial Sequence
  Synthetic
ggctcattgtgaacaggccagtaatgtccgggatggggcggcataggcggg

SEQ ID NO: 604 - DNA, 51 bp, Artificial Sequence
  Synthetic
gtagctaaagaacttgaccaagacatatcaggatccacctcagctcctaga

SEQ ID NO: 605 - DNA, 51 bp, Artificial Sequence
  Synthetic
ggggcattgttctgtgcccagtcctgctggtagacctgctccccggtggct

SEQ ID NO: 606 - DNA, 51 bp, Artificial Sequence
  Synthetic
gagaagtcgttcatgtgccaccgtgggagcgtacagtcatcattgatcttg

SEQ ID NO: 607 - DNA, 51 bp, Artificial Sequence
  Synthetic
gggattaatgctgaacgcaccaaagttcatcccaccacccatattactacc

SEQ ID NO: 608 - DNA, 51 bp, Artificial Sequence
  Synthetic
gctccaaaggctttcctccactgttgcaaagttattgaatcccaagacaca

SEQ ID NO: 609 - DNA, 51 bp, Artificial Sequence
  Synthetic
gatgaatgaacgatttcccagaactccctaatcagaacagagtccctggta

SEQ ID NO: 610 - DNA, 51 bp, Artificial Sequence
  Synthetic
ggagcctctgccggagcccagagaacccgagagtcagacagagccagcgcc

SEQ ID NO: 611 - DNA, 51 bp, Artificial Sequence
  Synthetic
ggcttccgtggagacacccaatcaatttgaagagatcttgaagtgatgcca

SEQ ID NO: 612 - DNA, 51 bp, Artificial Sequence
  Synthetic
gtgggactgccctcctcccatttgcagatgccgtcgtagaatcgcagcagg

SEQ ID NO: 613 - DNA, 51 bp, Artificial Sequence
  Synthetic
gcttcttcaatagttctccagctacactggcaggcatatgcccgtgttcct

SEQ ID NO: 614 - DNA, 51 bp, Artificial Sequence
  Synthetic
gattccttttcttcgtcccaattcacctcagtggctagtcgaagaatgaag

SEQ ID NO: 615 - DNA, 51 bp, Artificial Sequence
  Synthetic
gcagcttcagcaccttccagtcagactcctgcttcaagcactgcagcagga

SEQ ID NO: 616 - DNA, 51 bp, Artificial Sequence
  Synthetic
gccatttgcttgcagtgccactccagaggattccggattgccataaatact

SEQ ID NO: 617 - DNA, 51 bp, Artificial Sequence
  Synthetic
gttcaatagttttggtccagtatcgtttacagcccttcttggtagatttca

SEQ ID NO: 618 - DNA, 51 bp, Artificial Sequence
  Synthetic
ggcaaccgtcttctgaccaaatggcagaacatttgtccccaactttccact

SEQ ID NO: 619 - DNA, 51 bp, Artificial Sequence
  Synthetic
gcgactttccaatgaaccactgaagcccaggtatgacaaagccgatgatct

SEQ ID NO: 620 - DNA, 51 bp, Artificial Sequence
  Synthetic
gtttacactcatgcttccacagctttaacagatcatttggttccttgatga

SEQ ID NO: 621 - DNA, 51 bp, Artificial Sequence
  Synthetic
gcttaagcttccgtgtccagccttcaggcagggtggggtcatcatacatgg

SEQ ID NO: 622 - DNA, 51 bp, Artificial Sequence
  Synthetic
ggacagctgggctgatccatgatgtcatccagaaacactggggaccctcag

SEQ ID NO: 623 - DNA, 51 bp, Artificial Sequence
  Synthetic
gtctcatctcaactttccatatccgtatcatggaatcatagcatcctgtaa

SEQ ID NO: 624 - DNA, 51 bp, Artificial Sequence
  Synthetic
gcatgcagacgcggttccactcgcagccacagttccagcaccactcgagcc

SEQ ID NO: 625 - DNA, 51 bp, Artificial Sequence
  Synthetic
gttggttagggtcaacccagtattctccactcttgagttcaggatggcaga

SEQ ID NO: 626 - DNA, 51 bp, Artificial Sequence
  Synthetic
gctacactgtccaacacccactctcgggtcaccacaggtgcctcacacatc

SEQ ID NO: 627 - DNA, 51 bp, Artificial Sequence
  Synthetic
gctgcactgtgtacccccagagctccgtgttgccgacatcctggggtggct

SEQ ID NO: 628 - DNA, 51 bp, Artificial Sequence
  Synthetic
gagcttcctgccactcccaacaggtttcacagtaagcgcgtatctgttcca

SEQ ID NO: 629 - DNA, 51 bp, Artificial Sequence
  Synthetic
gacggcaagagcttacccagtcacttgtgtggagacttaaatacttgcata

SEQ ID NO: 630 - DNA, 51 bp, Artificial Sequence; identical to SEQ ID NO: 580
  Synthetic

SEQ ID NO: 631 - DNA, 51 bp, Artificial Sequence; identical to SEQ ID NO: 581
  Synthetic

SEQ ID NO: 632 - DNA, 51 bp, Artificial Sequence; identical to SEQ ID NO: 582
  Synthetic

SEQ ID NO: 633 - DNA, 51 bp, Artificial Sequence; identical to SEQ ID NO: 583
  Synthetic

SEQ ID NO: 634 - DNA, 51 bp, Artificial Sequence; identical to SEQ ID NO: 584
  Synthetic

SEQ ID NO: 635 - DNA, 51 bp, Artificial Sequence; identical to SEQ ID NO: 585
  Synthetic

SEQ ID NO: 636 - DNA, 51 bp, Artificial Sequence; identical to SEQ ID NO: 586
  Synthetic

SEQ ID NO: 637 - DNA, 30 bp, Artificial Sequence; identical to SEQ ID NO: 574
  Synthetic

SEQ ID NO: 638 - DNA, 51 bp, Artificial Sequence; identical to SEQ ID NO: 202
  Synthetic

SEQ ID NO: 639 - DNA, 34 bp, Artificial Sequence
  Synthetic
gcagggttttcccagtcacgacgttgtaaagttg

SEQ ID NO: 640 - DNA, 51 bp, Artificial Sequence
  Synthetic
gtcaaggcactcttgcccacgccaccagctccaactaccacaagtttatat

SEQ ID NO: 641 - DNA, 51 bp, Artificial Sequence
  Synthetic
gcaaagatcacccggcccacatcttcatctccaattcgtaggtcaaaatac

SEQ ID NO: 642 - DNA, 51 bp, Artificial Sequence
  Synthetic
gcgccaccagctccaaccaccacaagtttatattcagtcattttcagcagg

SEQ ID NO: 643 - DNA, 51 bp, Artificial Sequence
  Synthetic
gtttctccatcaattaccacttgcttcctgtaggaatcctctattgttgga

SEQ ID NO: 644 - DNA, 51 bp, Artificial Sequence; identical to SEQ ID NO: 582
  Synthetic

SEQ ID NO: 645 - DNA, 30 bp, Artificial Sequence; identical to SEQ ID NO: 574
  Synthetic

SEQ ID NO: 646 - DNA, 83 bp, Artificial Sequence
  Synthetic
tctttccataggccctgaaaaagggcctgttctaaaccatcctgcggcctctactcggccctgaaaaagggccattcaattac

SEQ ID NO: 647 - DNA, 83 bp, Artificial Sequence
  Synthetic
cagctggcgaggccctgaaaaagggccggggatgtgccgcaaggcgattaagttggggccctgaaaaagggccacgccagggt

SEQ ID NO: 648 - DNA, 79 bp, Artificial Sequence
  Synthetic
gtggaatagtataacaatatgctaaatgttgttatagtatcccactctaaaccatcctgcggggccctcttcagggccc

SEQ ID NO: 649 - DNA, 79 bp, Artificial Sequence
  Synthetic
gtggaatagtataacaatatgctaaatgttgttatagtatcccacaccctggcgttacccagggccctcttcagggccc

SEQ ID NO: 650 - protein, 385 aa, Homo sapiens
QLHLPQVLADAVSRLVLGKFGDLTDNFSSPHARRKVLAGVVMTTGTDVKDAKVISVSTGTKCINGEYMSDRGLALNDCHAEIISRRSLLRFLYTQLELYLNNKDDQKRSIFQKSERGGFRLKENVQFHLYISTSPCGDARIFSPHEPILEEPADRHPNRKARGQLRTKIESGQGTIPVRSNASIQTWDGVLQGERLLTMSCSDKIARWNVVGIQGSLLSIFVEPIYFSSIILGSLYHGDHLSRAMYQRISNIEDLPPLYTLNKPLLSGISNAEARQPGKAPNFSVNWTVGDSAIEVINATTGKDELGRASRLCKHALYCRWMRVHGKVPSHLLRSKITKPNVYHESKLAAKEYQAAKARLFTAFIKAGLGAWVEKPTEQDQFSLT

SEQ ID NO: 651 - protein, 336 aa, Homo sapiens
SLGTGNRCVKGDSLSLKGETVNDCHAEIISRRGFIRFLYSELMKYNSQTAKDSIFEPAKGGEKLQIKKTVSFHLYISTAPCGDGALFDKSCSDRAMESTESRHYPVFENPKQGKLRTKVENGQGTIPVESSDIVPTWDGIRLGERLRTMSCSDKILRWNVLGLQGALLTHFLQPIYLKSVTLGYLFSQGHLTRAICCRVTRDGSAFEDGLRHPFIVNHPKVGRVSIYDSKRQSGKTKETSVNWCLADGYDLEILDGTRGTVDGPRNELSRVSKKNIFLLFKKLCSFRYRRDLLRLSYGEAKKAARDYETAKNYFKKGLKDMGYGNWISKPQEEKNF

SEQ ID NO: 652 - protein, 340 aa, Octopus vulgaris
SVGTGNRCLTGDHLSLEGNSVNDSHAEMITRRGFLRYLYRHLLEYDAEVPNDLFEKGERSICRIKTNITFHLYISTAPCGDGALFSPRDTDSSNAKMEEENKHIHNPTFSSSVQGLLRTKVEGGQGTIPIDADFTEQTWDGIQRGERLRTMSCSDKICRWNVVGLQGALLSHFIEPIYLDSLTLGYLYDHGHLARAVCCRIERGEASVNQLLPEGYRLNHPWLGRVTACDPPRETQKTKSLSINWCYDDEKSEVLDGTAGICYTAIEKNLFSRLTKHNLYEEFKRVCRKFDRNDLLTAPSYNKAKMMATPFQTAKNVMLKKLKENNCGTWVSKPIEEEMF

SEQ ID NO: 653 - protein, 340 aa, Sepia
SVGTGNRCLTGDRLSLEGNSVNDSHAEMVTRRGFLRYLYKHLLEYDPEKPHDLFEKGERSLCRIKTNITFHLYISTAPCGDGALFSPRDTDSSNVKVDEENKHVHNPTFSSSVQGLLRTKVEGGQGTIPIDADFTEQTWDGIQRGERLRTMSCSDKICRWNVVGLQGALLSHFVEPIYLESLTLGYLYDHGHLARAVCCRIERGEASVNQLLPEGYRLNHPWLGRVTACDPPRETQKTKSLSINWCYDDEKSEVLDGTAGICYTAIEKNLFSRLTKHSLYEEFKKVCQKFEREDLLNVTSYNKAKMMAIPFQTAKNVMLKKLKENNCGTWVSKPIEEEMF

SEQ ID NO: 654 - protein, 328 aa, Octopus vulgaris
GIGTGTKCINGEHMSDRGFGVNDCHAEIIARRCFLRYIYDQLELHLSDNSDVRNSSIFELRDKGGYQLKENIQFHLYISTAPCGDARIFSPHGQDVETGDRHPNRKARGQLRTKIESGQGTIPVRTSGVIQTWDGVLEGERLLTMSCSDKIARWNVLGIQGSLLSHFMNPIYLESIILGSLYHSDHLSRAMYSRISIIENLPEPFHLNRPFLSGISSPESRQPGKAPNFGINWRKEDETFEVINAMTGRVEGGSVSRICKQALFGRFMSLYGKLSSLTGQSVTTRPTHYSDAKAAVMEYQLAKQCVFQAFQKAGLGNWVQKPIEQDQF

SEQ ID NO: 655 - protein, 328 aa, Sepia
GIGTGTKCINGEYMNDRGFAVNDCHAEIIARRCFLRFIYDQLEMHLSEDPEVRGQSVFELRDGGGYKLKPNIHFHLYISTAPCGDARIFSPHGQDVETGDRHPNRKARGQLRTKIESGQGTIPVRSSGFIQTWDGVLEGERLLTMSCSDKIARWNVLGIQGALLCHFMHPIYLESIILGSLYHSDHLSRAVYCRIASIENLPDLFQLNRPFLSGISSPESRQPGKAPNFGINWRRNDDTFEVINAMTGRVEGGNMSRICKQALFDRFMNLYGRLSSLTGQSVTTRPTLYSEAKAAVMEYQLAKQCVFQAFQKAGLGNWVQKPIEQDQF

SEQ ID NO: 656 - protein, 328 aa, Doryteusthis opalescens
GIGTGTKCINGEYMNDRGFAVNDCHAEIIARRCFLRFIYDQLELHLSDNAEVRGQSIFELRDAGGYKLKPNIQFHLYISTAPCGDARIFSPHGQDVETGDRHPNRKARGQLRTKIESGQGTIPVRSSGFIQTWDGVLEGERLLTMSCSDKIARWNVLGVQGALLCHFMHPIYLESIILGSLYHSDHLSRAVYCRIAAIENLPDLFRLNRPFLSGISSPESRQPGKAPNFGINWRRNDDSFEVINAMTGRVEGGSMSRICKQALFDRFMNLYGKLSSLTGQSVTTRPALYSEAKATVMEYQLAKQCVFQAFQKAGLGNWVQKPIEQDQF

SEQ ID NO: 657 - DNA, 57 bp, Artificial Sequence
  Synthetic
gaatgcagagtagaggccgcaggatagtttagaacattctatggaaagagattccag

SEQ ID NO: 658 - DNA, 88 bp, Artificial Sequence
  Synthetic
ttgccgaatgtgtcagtatgtaattgaatgcagagtagaggccgcaggatagtttagaacattctatggaaagagattccagttccag

SEQ ID NO: 659 - DNA, 88 bp, Artificial Sequence
  Synthetic
gtggaactggaatctctttccatagaatgttctaaactatcctgcggcctctactctgcattcaattacatactgacacattcggcaa

SEQ ID NO: 660 - protein, 28 aa, Artificial Sequence
  Synthetic
CRMCQYVIECRVEAAGFRTFYGKRFQFQ

SEQ ID NO: 661 - RNA, 19 nt, Artificial Sequence
  Synthetic
augacauggacugauuugc

SEQ ID NO: 662 - RNA, 19 nt, Artificial Sequence
  Synthetic
  misc_feature (1)..(19): "n"  represents inosine
augacnuggacugauuugc

SEQ ID NO: 663 - RNA, 19 nt, Artificial Sequence
  Synthetic
uacugcaccggacgaaacg

SEQ ID NO: 664 - RNA, 19 nt, Artificial Sequence
  Synthetic
uacugcaccggacgaaacg

SEQ ID NO: 665 - RNA, 19 nt, Artificial Sequence
  Synthetic
  misc_feature (1)..(19): "n" is any nucleotide
augacauggacugauuugc

SEQ ID NO: 666 - RNA, 19 nt, Artificial Sequence
  Synthetic
  misc_feature (1)..(19): "n" represents inosine
augacnuggacugauuugc

SEQ ID NO: 667 - RNA, 19 nt, Artificial Sequence
  Synthetic
uacugcaccagacaaaacg

SEQ ID NO: 668 - RNA, 19 nt, Artificial Sequence
  Synthetic
uacugcaccagacaaaacg

SEQ ID NO: 669 - RNA, 19 nt, Artificial Sequence
  Synthetic
augacauggacugauuugc

SEQ ID NO: 670 - RNA, 19 nt, Artificial Sequence
  Synthetic
  misc_feature (1)..(19): "n" represents inosine
augacnuggacugnuuugc

SEQ ID NO: 671 - RNA, 19 nt, Artificial Sequence
  Synthetic
uacugcaccggaccaaacg

SEQ ID NO: 672 - RNA, 19 nt, Artificial Sequence
  Synthetic
uacugcaccggaccaaacg

SEQ ID NO: 673 - DNA, 36 bp, Artificial Sequence
  Synthetic
tggaggtgctcaaagagatggaagccaatgcccgga

SEQ ID NO: 674 - DNA, 34 bp, Artificial Sequence
  Synthetic
agagatggaagccaatgcccggaaagctggctgc

SEQ ID NO: 675 - DNA, 37 bp, Artificial Sequence
  Synthetic
  misc_feature (1)..(37): "n" represents any nucleotide
nnggaggtgctcaaagagatggaagccaatgcccgga

SEQ ID NO: 676 - DNA, 36 bp, Artificial Sequence
  Synthetic
  misc_feature (1)..(36): "n" represents any nucleotide
tngaggtgctcaaagagatggaagccaatgcccgga

SEQ ID NO: 677 - DNA, 36 bp, Artificial Sequence
  Synthetic
  misc_feature (1)..(36): "n" represents any nucleotide
tgnaggtgctcaaagagatggaagccaatgcccgga

SEQ ID NO: 678 - DNA, 36 bp, Artificial Sequence
  Synthetic
  misc_feature (1)..(36): "n" represents any nucleotide
tggnggtgctcaaagagatggaagccaatgcccgga

SEQ ID NO: 679 - DNA, 36 bp, Artificial Sequence
  Synthetic
  misc_feature (1)..(36): "n" represents any nucleotide
tggnggtgctcaaagagatggaagccaatgcccggn

SEQ ID NO: 680 - DNA, 34 bp, Artificial Sequence
  Synthetic
  misc_feature (1)..(34): "n" represents any nucleotide
ngagatggaagccaatgcccggaaagctggctgc

SEQ ID NO: 681 - DNA, 34 bp, Artificial Sequence
  Synthetic
  misc_feature (1)..(34): "n" represents any nucleotide
anagatggaagccaatgcccggaaagctggctgc

SEQ ID NO: 682 - DNA, 34 bp, Artificial Sequence
  Synthetic
  misc_feature (1)..(34): "n" represents any nucleotide
agngatggaagccaatgcccggaaagctggctgc

SEQ ID NO: 683 - DNA, 34 bp, Artificial Sequence
  Synthetic
  misc_feature (1)..(34): "n" represents any nucleotide
aganatggaagccaatgcccggaaagctggctgc

SEQ ID NO: 684 - DNA, 34 bp, Artificial Sequence
  Synthetic
  misc_feature (1)..(34): "n" represents any nucleotide
agagatggaagccaatgcccggaaagctggctgn

SEQ ID NO: 685 - DNA, 36 bp, Artificial Sequence
  Synthetic
  misc_feature (1)..(36): "n" represents any nucleotide
nngaggtgctcaaagagatggaagccaatgcccgga

SEQ ID NO: 686 - DNA, 36 bp, Artificial Sequence
  Synthetic
  misc_feature (1)..(36): "n" represents any nucleotide
ngnaggtgctcaaagagatggaagccaatgcccgga

SEQ ID NO: 687 - DNA, 36 bp, Artificial Sequence
  Synthetic
  misc_feature (1)..(36): "n" represents any nucleotide
nggnggtgctcaaagagatggaagccaatgcccgga

SEQ ID NO: 688 - DNA, 36 bp, Artificial Sequence
  Synthetic
  misc_feature (1)..(36): "n" represents any nucleotide
nggangtgctcaaagagatggaagccaatgcccgga

SEQ ID NO: 689 - DNA, 36 bp, Artificial Sequence
  Synthetic
  misc_feature (1)..(36): "n" represents any nucleotide
tggaggtgctcaaagagatggaagccaatgcccgnn

SEQ ID NO: 690 - DNA, 34 bp, Artificial Sequence
  Synthetic
  misc_feature (1)..(34): "n" represents any nucleotide
nnagatggaagccaatgcccggaaagctggctgc

SEQ ID NO: 691 - DNA, 34 bp, Artificial Sequence
  Synthetic
  misc_feature (1)..(34): "n" represents any nucleotide
ngngatggaagccaatgcccggaaagctggctgc

SEQ ID NO: 692 - DNA, 34 bp, Artificial Sequence
  Synthetic
  misc_feature (1)..(34): "n" represents any nucleotide
nganatggaagccaatgcccggaaagctggctgc

SEQ ID NO: 693 - DNA, 34 bp, Artificial Sequence
  Synthetic
  misc_feature (1)..(34): "n" represents any nucleotide
ngagntggaagccaatgcccggaaagctggctgc

SEQ ID NO: 694 - DNA, 34 bp, Artificial Sequence
  Synthetic
  misc_feature (1)..(34): "n" represents any nucleotide
agagatggaagccaatgcccggaaagctggctnn

SEQ ID NO: 695 - RNA, 55 nt, Artificial Sequence
  Synthetic
aaugcagaguagaggccgcaggauaguuuagaacauucuauggaaagagauucca

SEQ ID NO: 696 - DNA, 48 bp, Artificial Sequence
  Synthetic
cgagcctcacacgtgctgcttgactacagggagacgtgcgctgctccc

SEQ ID NO: 697 - protein, 16 aa, Artificial Sequence
  Synthetic
RASHVLLDYRETCAAP

SEQ ID NO: 698 - DNA, 48 bp, Artificial Sequence
  Synthetic
cgagcctcacacgtggaaagggactacagggagacgtgcgctgctccc

SEQ ID NO: 699 - DNA, 48 bp, Artificial Sequence
  Synthetic
cgagcctcacacaagacccttgactacagggagacgtgcgctgctccc

SEQ ID NO: 700 - RNA, 45 nt, Artificial Sequence
  Synthetic
auugaaugcagaguagaggccgcaggauaguuuagaacauucuau

SEQ ID NO: 701 - RNA, 66 nt, Artificial Sequence
  Synthetic
ucuaaaccauccugcggccucuacucugcaguuguggaagguccaguuuugggggcuauuacaaca

SEQ ID NO: 702 - RNA, 104 nt, Artificial Sequence
  Synthetic
gccgaaugugucaguauguaauugaaugcagaguagaggccgcaggauaguuuagaacauucuauggaaagagauuccaguuccaggaaccugguacauacgug

SEQ ID NO: 703 - RNA, 24 nt, Artificial Sequence
  Synthetic
  misc_feature (1)..(24): "n" represents any nucleotide
nnnngacuacagnucccgaacuag

SEQ ID NO: 704 - RNA, 48 nt, Artificial Sequence
  Synthetic
gacuaauaggaugaggaaaaucagcacaagcaaaaccauaaauacuau

SEQ ID NO: 705 - RNA, 65 nt, Artificial Sequence
  Synthetic
ucgucuaugugcugugcugggcacccuucuuccuggugcagcuguaggccgcgugggacccggag

SEQ ID NO: 706 - RNA, 50 nt, Artificial Sequence
  Synthetic
acgacacgacccgugggaagaaggaccacgucgacacccggcgcacccug

SEQ ID NO: 707 - RNA, 50 nt, Artificial Sequence
  Synthetic
gacacgacccgugggaagaaggaccacgucgacacccggcgcacccuggg

SEQ ID NO: 708 - RNA, 50 nt, Artificial Sequence
  Synthetic
cacgacccgugggaagaaggaccacgucgacacccggcgcacccugggcc

SEQ ID NO: 709 - RNA, 64 nt, Artificial Sequence
  Synthetic
ccucaacuuccugcucuggguccuggaggccacacgaucgccuaggaugucaucacccugaugg

SEQ ID NO: 710 - RNA, 50 nt, Artificial Sequence
  Synthetic
aggacgagacccgaggaccuccggugugcuagcggacccuacaguagugg

SEQ ID NO: 711 - RNA, 50 nt, Artificial Sequence
  Synthetic
gacgagacccgaggaccuccggugugcuagcggacccuacaguaguggga

SEQ ID NO: 712 - RNA, 50 nt, Artificial Sequence
  Synthetic
gagacccgaggaccuccggugugcuagcggacccuacaguagugggacua

SEQ ID NO: 713 - RNA, 99 nt, Artificial Sequence
  Synthetic
cccaggugcgggagagaggccugcugaaaaugacugaauauaaacuugugguaguuggagcugguggcguaggcaagagugccuugacgauacagcuaa

SEQ ID NO: 714 - RNA, 50 nt, Artificial Sequence; identical to SEQ ID NO: 706
  Synthetic

SEQ ID NO: 715 - RNA, 50 nt, Artificial Sequence; identical to SEQ ID NO: 707
  Synthetic

SEQ ID NO: 716 - RNA, 50 nt, Artificial Sequence; identical to SEQ ID NO: 708
  Synthetic

SEQ ID NO: 717 - RNA, 65 nt, Artificial Sequence
  Synthetic
ccucaacuuccugcucugggcuccuggaggccacacgaucgccuaggaugucaucacccugaugg

SEQ ID NO: 718 - RNA, 50 nt, Artificial Sequence; identical to SEQ ID NO: 710
  Synthetic

SEQ ID NO: 719 - RNA, 50 nt, Artificial Sequence; identical to SEQ ID NO: 711
  Synthetic

SEQ ID NO: 720 - RNA, 50 nt, Artificial Sequence; identical to SEQ ID NO: 712
  Synthetic

SEQ ID NO: 721 - DNA, 44 bp, Artificial Sequence
  Synthetic
tatgtaattgaatgcagagtagaggccgcaggatagtttagaac

SEQ ID NO: 722 - RNA, 39 nt, Artificial Sequence
  Synthetic
  misc_feature (1)..(39): "n" represents any ribonucleotide
augnnuugccaccgacgacaccgugaggauaaauunnnn

SEQ ID NO: 723 - RNA, 36 nt, Artificial Sequence
  Synthetic
uggaggugcucaaagagauggaagccaaugcccgga

SEQ ID NO: 724 - RNA, 36 nt, Artificial Sequence
  Synthetic
  misc_feature (1)..(36): "n" represents any ribonucleotide
nggaggugcucaaagagauggaagccaaugcccgga

SEQ ID NO: 725 - RNA, 36 nt, Artificial Sequence
  Synthetic
  misc_feature (1)..(36): "n" represents any ribonucleotide
ungaggugcucaaagagauggaagccaaugcccgga

SEQ ID NO: 726 - RNA, 36 nt, Artificial Sequence
  Synthetic
  misc_feature (1)..(36): "n" represents any ribonucleotide
ugnaggugcucaaagagauggaagccaaugcccgga

SEQ ID NO: 727 - RNA, 36 nt, Artificial Sequence
  Synthetic
  misc_feature (1)..(36): "n" represents any ribonucleotide
uggnggugcucaaagagauggaagccaaugcccgga

SEQ ID NO: 728 - RNA, 36 nt, Artificial Sequence
  Synthetic
  misc_feature (1)..(36): "n" represents any ribonucleotide
uggaggugcucaaagagnuggaagccaaugcccgga

SEQ ID NO: 729 - RNA, 36 nt, Artificial Sequence
  Synthetic
  misc_feature (1)..(36): "n" represents any ribonucleotide
uggaggugcucaaagagauggaagccaaugcccggn

SEQ ID NO: 730 - RNA, 36 nt, Artificial Sequence
  Synthetic
  misc_feature (1)..(36): "n" represents any ribonucleotide
nngaggugcucaaagagauggaagccaaugcccgga

SEQ ID NO: 731 - RNA, 36 nt, Artificial Sequence
  Synthetic
  misc_feature (1)..(36): "n" represents any ribonucleotide
ngnaggugcucaaagagauggaagccaaugcccgga

SEQ ID NO: 732 - RNA, 36 nt, Artificial Sequence
  Synthetic
  misc_feature (1)..(36): "n" represents any ribonucleotide
nggnggugcucaaagagauggaagccaaugcccgga

SEQ ID NO: 733 - RNA, 36 nt, Artificial Sequence
  Synthetic
  misc_feature (1)..(36): "n" represents any ribonucleotide
nggangugcucaaagagauggaagccaaugcccgga

SEQ ID NO: 734 - RNA, 36 nt, Artificial Sequence
  Synthetic
  misc_feature (1)..(36): "n" represents any ribonucleotide
uggaggugcucaangagnuggaagccaaugcccgga

SEQ ID NO: 735 - RNA, 36 nt, Artificial Sequence
  Synthetic
  misc_feature (1)..(36): "n" represents any ribonucleotide
uggaggugcucaaagagauggaagccaaugcccgnn

SEQ ID NO: 736 - RNA, 34 nt, Artificial Sequence
  Synthetic
agagauggaagccaaugcccggaaagcuggcugc

SEQ ID NO: 737 - RNA, 106 nt, Cypridinia luciferase
gccgaaugugucaguauguaauugaaugcagaguagaggccgcaggauaguuuagaacauucuauggaaagagauuccaguuccaggaaccugguacauacguguu

SEQ ID NO: 738 - RNA, 30 nt, Artificial Sequence
  Synthetic
uuaacuuacgucucaucuccggcguccuac

SEQ ID NO: 739 - RNA, 30 nt, Artificial Sequence
  Synthetic
cuuacgucucaucuccggcguccuaccaaa

SEQ ID NO: 740 - RNA, 30 nt, Artificial Sequence
  Synthetic
cgucucaucuccggcguccuaccaaaucuu

SEQ ID NO: 741 - RNA, 30 nt, Artificial Sequence
  Synthetic
ucaucuccggcguccuaccaaaucuuguaa

SEQ ID NO: 742 - RNA, 30 nt, Artificial Sequence
  Synthetic
cuccggcguccuaccaaaucuuguaagaua

SEQ ID NO: 743 - RNA, 30 nt, Artificial Sequence
  Synthetic
ggcguccuaccaaaucuuguaagauaccuu

SEQ ID NO: 744 - RNA, 30 nt, Artificial Sequence
  Synthetic
uccuaccaaaucuuguaagauaccuuucuc

SEQ ID NO: 745 - RNA, 30 nt, Artificial Sequence
  Synthetic
accaaaucuuguaagauaccuuucucuaag

SEQ ID NO: 746 - RNA, 104 nt, Homo sapiens
uuggucucuucggaaagacuguuccaaaaacaguggauaauuuuguggccuuagcuacaggagagaaaggauuuggcuacaaaaacagcaaauuccaucgugua

SEQ ID NO: 747 - RNA, 50 nt, Artificial Sequence
  Synthetic
cagagaagccuuucugacaagguuuuugucaccuauuaaaacaccggaac

SEQ ID NO: 748 - RNA, 50 nt, Artificial Sequence
  Synthetic
ccuuucugacaagguuuuugucaccuauuaaaacaccggaaccgaugucc

SEQ ID NO: 749 - RNA, 50 nt, Artificial Sequence
  Synthetic
acaagguuuuugucaccuauuaaaacaccggaaccgauguccucucuuuc

SEQ ID NO: 750 - RNA, 50 nt, Artificial Sequence
  Synthetic
uuugucaccuauuaaaacaccggaaccgauguccucucuuuccuaaaccg

SEQ ID NO: 751 - RNA, 50 nt, Artificial Sequence
  Synthetic
cuauuaaaacaccggaaccgauguccucucuuuccuaaaccgauguuuuu

SEQ ID NO: 752 - RNA, 50 nt, Artificial Sequence
  Synthetic
acaccggaaccgauguccucucuuuccuaaaccgauguuuuugucguuua

SEQ ID NO: 753 - RNA, 50 nt, Artificial Sequence
  Synthetic
accgauguccucucuuuccuaaaccgauguuuuugucguuuaagguagca

SEQ ID NO: 754 - RNA, 56 nt, Artificial Sequence
  Synthetic
aguauguaauugaaugcagaguagaggccgcaggauaguuuagaacauucuaugga

SEQ ID NO: 755 - RNA, 50 nt, Artificial Sequence
  Synthetic
  misc_feature (1)..(50): "n" represents any nucleotide
auagaauguucuaaacnauccugcggccucuacucugcauucaauuacau

SEQ ID NO: 756 - RNA, 59 nt, Artificial Sequence
  Synthetic
auguaauugaaugcagaguagaggccgcaggauaguuuagaacauucuauggaaagaga

SEQ ID NO: 757 - RNA, 83 nt, Artificial Sequence
  Synthetic
ucuuuccauaggcccugaaaaagggccuguucuaaaccauccugcggccucuacucggcccugaaaaagggccauucaauuac

SEQ ID NO: 758 - RNA, 21 nt, Artificial Sequence
  Synthetic
ggccgcaggauaguuuagaac

SEQ ID NO: 759 - RNA, 55 nt, Artificial Sequence
  Synthetic
aaauguuguuauaguaucccaccucuaaaccauccugcggggcccuagggcccuu

SEQ ID NO: 760 - RNA, 26 nt, Artificial Sequence
  Synthetic
accgguggaauaguauaacaauaugc

SEQ ID NO: 761 - protein, 356 aa, Homo sapiens
MGSGGGGSEGAPKKKRKVGSSLGTGNRCVKGDSLSLKGETVNDCHAEIISRRGFIRFLYSELMKYNSQTAKDSIFEPAKGGEKLQIKKTVSFHLYISTAPCGDGALFDKSCSDRAMESTESRHYPVFENPKQGKLRTKVENGQGTIPVESSDIVPTWDGIRLGERLRTMSCSDKILRWNVLGLQGALLTHFLQPIYLKSVTLGYLFSQGHLTRAICCRVTRDGSAFEDGLRHPFIVNHPKVGRVSIYDSKRQSGKTKETSVNWCLADGYDLEILDGTRGTVDGPRNELSRVSKKNIFLLFKKLCSFRYRRDLLRLSYGEAKKAARDYETAKNYFKKGLKDMGYGNWISKPQEEKNF

SEQ ID NO: 762 - protein, 668 aa, Fusobacterium necrophorum subsp. funduliforme; identical to SEQ ID NO: 158

SEQ ID NO: 763 - protein, 796 aa, Tissierella sp.
MEKDKKGEKIDISQEMIEEDLRKILILFSRLRHSMVHYDYEFYQALYSGKDFVISDKNNLENRMISQLLDLNIFKELSKVKLIKDKAISNYLDKNTTIHVLGQDIKAIRLLDIYRDICGSKNGFNKFINTMITISGEEDREYKEKVIEHFNKKMENLSTYLEKLEKQDNAKRNNKRVYNLLKQKLIEQQKLKEWFGGPYVYDIHSSKRYKELYIERKKLVDRHSKLFEEGLDEKNKKELTKINDELSKLNSEMKEMTKLNSKYRLQYKLQLAFGFILEEFDLNIDTFINNFDKDKDLIISNFMKKRDIYLNRVLDRGDNRLKNIIKEYKFRDTEDIFCNDRDNNLVKLYILMYILLPVEIRGDFLGFVKKNYYDMKHVDFIDKKDKEDKDTFFHDLRLFEKNIRKLEITDYSLSSGFLSKEHKVDIEKKINDFINRNGAMKLPEDITIEEFNKSLILPIMKNYQINFKLLNDIEISALFKIAKDRSITFKQAIDEIKNEDIKKNSKKNDKNNHKDKNINFTQLMKRALHEKIPYKAGMYQIRNNISHIDMEQLYIDPLNSYMNSNKNNITISEQIEKIIDVCVTGGVTGKELNNNIINDYYMKKEKLVFNLKLRKQNDIVSIESQEKNKREEFVFKKYGLDYKDGEINIIEVIQKVNSLQEELRNIKETSKEKLKNKETLFRDISLINGTIRKNINFKIKEMVLDIVRMDEIRHINIHIYYKGENYTRSNIIKFKYAIDGENKKYYLKQHEINDINLELKDKFVTLICNMDKHPNKNKQTINLESNYIQNVKFIIP

SEQ ID NO: 764 - protein, 897 aa, Fusobacterium ulcerans; identical to SEQ ID NO: 160

SEQ ID NO: 765 - protein, 919 aa, Cetobacterium sp. ZOR0034
MEEIKHKKNKSSIIRVIVSNYDMTGIKEIKVLYQKQGGVDTFNLKTIINLESGNLEIISCKPKEREKYRYEFNCKTEINTISITKKDKVLKKEIRKYSLELYFKNEKKDTVVAKVTDLLKAPDKIEGERNHLRKLSSSTERKLLSKTLCKNYSEISKTPIEEIDSIKIYKIKRFLNYRSNFLIYFALINDFLCAGVKEDDINEVWLIQDKEHTAFLENRIEKITDYIFDKLSKDIENKKNQFEKRIKKYKTSLEELKTETLEKNKTFYIDSIKTKITNLENKITELSLYNSKESLKEDLIKIISIFTNLRHSLMHYDYKSFENLFENIENEELKNLLDLNLFKSIRMSDEFKTKNRTNYLDGTESFTIVKKHQNLKKLYTYYNNLCDKKNGFNTFINSFFVTDGIENTDFKNLIILHFEKEMEEYKKSIEYYKIKISNEKNKSKKEKLKEKIDLLQSELINMREHKNLLKQIYFFDIHNSIKYKELYSERKNLIEQYNLQINGVKDVTAINHINTKLLSLKNKMDKITKQNSLYRLKYKLKIAYSFLMIEFDGDVSKFKNNFDPTNLEKRVEYLDKKEEYLNYTAPKNKFNFAKLEEELQKIQSTSEMGADYLNVSPENNLFKFYILTYIMLPVEFKGDFLGFVKNHYYNIKNVDFMDESLLDENEVDSNKLNEKIENLKDSSFFNKIRLFEKNIKKYEIVKYSVSTQENMKEYFKQLNLDIPYLDYKSTDEIGIFNKNMILPIFKYYQNVFKLCNDIEIHALLALANKKQQNLEYAIYCCSKKNSLNYNELLKTFNRKTYQNLSFIRNKIAHLNYKELFSDLFNNELDLNTKVRCLIEFSQNNKFDQIDLGMNFINDYYMKKTRFIFNQRRLRDLNVPSKEKIIDGKRKQQNDSNNELLKKYGLSRTNIKDIFNKAWY

SEQ ID NO: 766 - protein, 1110 aa, Fusobacterium necrophorum; identical to SEQ ID NO: 157

SEQ ID NO: 767 - protein, 1111 aa, Fusobacterium necrophorum; identical to SEQ ID NO: 156

SEQ ID NO: 768 - protein, 1111 aa, Anaerosalibacter massiliensis; identical to SEQ ID NO: 161

SEQ ID NO: 769 - protein, 1111 aa, Fusobacterium necrophorum
MEKFRRQNRNSIIKIIISNYDTKGIKELKVRYRKQAQLDTFIIKTEIVNNDIFIKSIIEKAREKYRYSFLFDGEEKYHFKNKSSVEIVKKDIFSQTPDNMIRNYKITLKISEKNPRVVEAEIEDLMNSTILKDGRRSARREKSVTERKLIEEKVAENYSLLANCPMEEVDSIKIYKIKRFLTYRSNMLLYFASINSFLCEGIKGKENETEEIWHLKDNDVRKEKVKENFKNKLIQSTENYNSSLKNQIEEKEKLLRKESKKGAFYRTIIKKLQQERIKELSEKSLTEDCEKIIKLYSKLRHSLMHYDYQYFENLFENKETPELKDKLDLHLFKSLPLIRKMKLNNKVNYLEDGDTLFVLQKTKKAKTLYQIYDALCEQKNGFNKFINDFFVSDGEENTVFKQIINEKFQSEMEFLGKRISESEEKNPKLKKKFDSMKAHFHNINSEDTKEAYFWDIHSSSNYKTKYNERKNLVNEYTELLGSSKEKKLLREEITQINRKLLKLKQEMEEITKKNSLFRLEYKMKMAFGFLFCEFDGNISRFKDEFDASNQEKIIQYHKNGEKYLTYFLKEEEKEKFNLKKLQETIQKTGKENWLLPQNKNNLFKFYLLTYLLLPYELKGDFLGFVKKHYYDIKNVDFMDENQSSKIIESKEDDFYHKIRLFEKNTKKYEIVKYSIVPDEKLKQYFKDLGIDTKYLILEQKSEVSGEKNKKVSLKNNGMFNKTILLFVFKYYQIAFKLFNDIELYSLFFLREKSGKPFEVFLKELKDKMIGKQLNFGQLLYVIYEVLVKNKDLSEILSERIDYRKDMCFSAEIADLRNFLSHLNYSKFLDNFMKINTNKSDENKEVLIPSIKIQKMIKFIEECNLQSQIDFDFNFVNDFYMRKEKMFFIQLKQIFPDINSTEKQKMNEKEEILRNRYHLTDKKNEQIKDEHEAQSQLYEKILSLQKIYSSDKNNFYGRLKEEKLLFLGKQGKKKLSMEEIKDKIAGDISDLLGILKKEITRDIKDKLTEKFRYCEEKLLNLSFYNHQDKKKEESIRVFLIRDKNSDNFKFESILDDGSNKIFISKNGKEITIQCCDKVLETLMIEKNTLKISSNGKIISLVPHYSYSIDVKY

SEQ ID NO: 770 - protein, 1115 aa, Fusobacterium necrophorum; identical to SEQ ID NO: 155

SEQ ID NO: 771 - protein, 1121 aa, Fusobacterium perfoetens; identical to SEQ ID NO: 159

SEQ ID NO: 772 - protein, 1137 aa, Fusobacterium necrophorum
MEKFRRQNRNSIIKIIISNYDTKGIKELKVRYRKQAQLDTFIIKTEIVNNDIFIKSIIEKAREKYRYSFLFDGEEKYHFKNKSSVEIVKKDIFSQTPDNMIRNYKITLKISEKNPRVVEAEIEDLMNSTILKDGRRSARREKSMTERKLIEEKVAKNYSLLANCPMEEVDSIKIYKIKRFLTYRSNMLLYFASINSFLCEGIKGKDNETEEIWHLKDNDVRKEKVRENFKNKLIQSTENYNSSLKNQIEEKEKLLRKEFKKGAFYRTIIKKLQQERIKELSEKSLTEDCEKIIKLYSKLRHSLMHYDYQYFENLFENKKNDDLMKDLNLDLFKSLPLIRKMKLNNKVNYLEDGDTLFVLQKTKKAKTLYQIYDALCEQKNGFNKFINDFFVSDGEENTVFKQIINEKFQSEMEFLEKRISESEKKNEKLKKKLDSMKAHFRNINSEDTKEAYFWDIHSSRNYKTKYNERKNLVNEYTELLGSSKEKKLLREEITKINRQLLKLKQEMEEITKKNSLFRLEYKMKIAFGFLFCEFDGNISKFKDEFDASNQEKIIQYHKNGEKYLTSFLKEEEKEKFNLEKMQKIIQKTEEEDWLLPETKNNLFKFYLLTYLLLPYELKGDFLGFVKKHYYDIKNVDFIDENQNNIQVSQTVEKQEDYFYHKIRLFEKNTKKYEIVKYSIVPNEKLKQYFEDLGIDIKYLTGSVESGEKWLGENLGIDIKYLTVEQKSEVSEEKNKKVSLKNNGMFNKTILLFVFKYYQIAFKLFNDIELYSLFFLREKSGKPLEIFRKELESKMKDGYLNFGQLLYVVYEVLVKNKDLDKILSKKIDYRKDKSFSPEIAYLRNFLSHLNYSKFLDNFMKINTNKSDENKEVLIPSIKIQKMIQFIEKCNLQNQIDFDFNFVNDFYMRKEKMFFIQLKQIFPDINSTEKQKMNEKEEILRNRYHLTDKKNEQIKDEHEAQSQLYEKILSLQKIYSSDKNNFYGRLKEEKLLFLEKQGKKKLSMEEIKDKIAGDISDLLGILKKEITRDIKDKLTEKFRYCEEKLLNLSFYNHQDKKKEESIRVFLIRDKNSDNFKFESILDDGSNKIFISKNGKEITIQCCDKVLETLIIEKNTLKISSNGKIISLIPHYSYSIDVKY

SEQ ID NO: 773 - protein, 1158 aa, Fusobacterium varium
MENKNKPNRGSIVRIIISNYDMKGIKELKVRYRKQAQLDTFILQTTLDKSNNSILINDFRVKAREKYRYSFTYDGKEKFSVPSNSIIVTKIDNAAPEKSKEIRKYKITLGIDEKCKTGSMITAAIEDLLEDDRVREGIRNPRRKASKTERKLITESICHNYAQITQCPVEEIDAVKIYKVKRFLSYRSNMLLFFALINDFLCKNLKNEKGEKINEIWEMENKGNNKKIDFDENYNILVAQIKEYFTKEIENYNNRIDNIIDKKELLKYSEEKEESEKNKKLEELNKLESQKLKILTDEEIKADVIKIIKIFSDLRHSLMHYEYKYFENLFENKKNEELAELLNLNLFKNLTLLRQMKIENKTNYLEGDEKFNILGKDVRAKNALGHYDLLVEQKNGFNNFINSFFVQDGTENLEFKKFIDENFIKAQKELEEDIKNCKESVKKLEKKLKENPKKSEDLEKKLEKKQKKLKELKKELEKMKQHYKRLNCAYVWDIHSSTVYKKLYNERKNLIEKYNKQLNGLQDKNAITGINAQLLRIKKEMEEITKSNSLFRLKYKMQIAYAFLEMEYEGNIAKFKNEFDCSKTEKIQEWLEKSEEYLNYCMEKEEDGKNYKFHFKEISEIKDTHNEEWLENTSENNLFKFYILTYLLLPMEFKGDFLGVVKKHYYDIKNVDFTDESEKELSQEQIDKMIGDSFFHKIRLFEKNTKRYEIIKYSILTSDEIKKYFELLELKVPYLEYKGIDEIGIFNKNIILPIFKYYQIIFRLYNDLEIHGLFNVSFDINKILSDLKSYGNENINFREFLYVIKQNNNSSTEEEYQKIWEKLESKYLKEPLLTPEKKEINKKTEKELKKLDGISFLRNKISHLEYEKIIEGVLKTAVNGENKKTSETNADKVFLNEKIKKIINFIKENELDKIELGFNFINDFFMKKEQFMFGQIKQVKEGNSDSITTERKRKEENNKRLKITYGLNYNNLSKIYEFSNTLREIVNSPLFLKDSTLLKKVDLSKVMLKEKPICSLQYENNTKLEDDIKRILLKDSSDIMGIYKAEVVKKLKEKLVLIFKYDEEKKIYVTVYDTSKAVPENISKEILVKRNNSKEEYFFEDNKKKYTTQYYTLEITKENELKVIPAKKLEGKEFKTEKKEENKLMLNNHYCFNVKIIY

SEQ ID NO: 774 - RNA, 24 nt, Cypridina luciferase
  misc_feature (1)..(1): N = a, g, c, or u
  misc_feature (2)..(4): n is a, c, g, or u
nnnngacuacagucccgaaacuag

SEQ ID NO: 775 - DNA, 48 bp, Artificial Sequence; identical to SEQ ID NO: 696
  Synthetic oligonucleotide

SEQ ID NO: 776 - DNA, 48 bp, Artificial Sequence; identical to SEQ ID NO: 698
  Synthetic oligonucleotide

SEQ ID NO: 777 - DNA, 48 bp, Artificial Sequence; identical to SEQ ID NO: 699
  Synthetic oligonucleotide

SEQ ID NO: 778 - RNA, 20 nt, Artificial Sequence
  Synthetic oligonucleotide
  misc_feature (12)..(12): N = a, g, c, or u
uuccccacauungacguuca

SEQ ID NO: 779 - RNA, 20 nt, Artificial Sequence
  Synthetic oligonucleotide
ugaacgaccaauguggggaa

SEQ ID NO: 780 - RNA, 20 nt, Artificial Sequence
  Synthetic oligonucleotide
uuccccacauuagacguuca

SEQ ID NO: 781 - RNA, 20 nt, Artificial Sequence
  Synthetic oligonucleotide
ugaacggccaauguggggaa

SEQ ID NO: 782 - DNA, 44 bp, Cypridinia luciferase; identical to SEQ ID NO: 721

SEQ ID NO: 783 - DNA, 36 bp, Cypridinia luciferase
tatgtaattgaatgcagccgcaggatggtttggagc

SEQ ID NO: 784 - DNA, 37 bp, Cypridinia luciferase
tatgtaattgaatgcagaccgcaggatagtttagaac

SEQ ID NO: 785 - DNA, 38 bp, Cypridinia luciferase
tatgtaattgaatgcagagccgcaggatggtttggaac

SEQ ID NO: 786 - DNA, 38 bp, Cypridinia luciferase
tatgtaattgaatgcagagtggaaggatagtttagaac

SEQ ID NO: 787 - DNA, 37 bp, Cypridinia luciferase
tatgtaattgaatgcagagtgaaggatggtttagaac

SEQ ID NO: 788 - DNA, 38 bp, Cypridinia luciferase
tgtgtaattgaatgcagagtggaaggatggtttagaac

SEQ ID NO: 789 - DNA, 38 bp, Cypridinia luciferase
tatgtaattgaatgcagagtggaagggtggtttggaac

SEQ ID NO: 790 - DNA, 38 bp, Cypridinia luciferase
tatgtaattgaatgcagagtagaaggatggtttagaac

SEQ ID NO: 791 - DNA, 39 bp, Cypridinia luciferase
tatgtaattgaatgcagagtagagaggatggtttggaac

SEQ ID NO: 792 - DNA, 39 bp, Cypridinia luciferase
tgtgtaattgaatgcagagtggagaggatggtttagaac

SEQ ID NO: 793 - DNA, 39 bp, Cypridinia luciferase
tatgtaattgaatgcagagtggagaggatggtttagagc

SEQ ID NO: 794 - DNA, 39 bp, Cypridinia luciferase
tatgtaattgaatgcagagtagagaggatggtttagaac

SEQ ID NO: 795 - DNA, 39 bp, Cypridinia luciferase
tatgtaattgaatgcagagtggaggccgcggtttggaac

SEQ ID NO: 796 - DNA, 39 bp, Cypridinia luciferase
tatgtaattgaatgcagagtagacaccgcggtttggagc

SEQ ID NO: 797 - DNA, 39 bp, Cypridinia luciferase
tatgtaattgaatgcagagtggaggccgcagtttggagc

SEQ ID NO: 798 - DNA, 39 bp, Cypridinia luciferase
tatgtaattgaatgcagagtagaggccgcaggttggaac

SEQ ID NO: 799 - DNA, 39 bp, Cypridinia luciferase
tgtgtaattgaatgcagagtggaggccgcaggttagaac

SEQ ID NO: 800 - DNA, 39 bp, Cypridinia luciferase
tatgtaattgaatgcagagtggaggccgcaggttggaac

SEQ ID NO: 801 - DNA, 39 bp, Cypridinia luciferase; identical to SEQ ID NO: 800

SEQ ID NO: 802 - DNA, 38 bp, Cypridinia luciferase
tatgtaattgaatgcagagtacaggccgcaggtggagc

SEQ ID NO: 803 - DNA, 39 bp, Cypridinia luciferase
tatgtaattgaatgcagagtccgcaggatggtttagaac

SEQ ID NO: 804 - DNA, 38 bp, Cypridinia luciferase
tatgtaattgaatgcagagtagcaggatagtttagaac

SEQ ID NO: 805 - DNA, 38 bp, Cypridinia luciferase
tatgtaattgaatgcagagtagaaggatagtttagaac

SEQ ID NO: 806 - DNA, 39 bp, Cypridinia luciferase
tatgtaattgaatgcagagtagagaggatagtttagaac

SEQ ID NO: 807 - DNA, 39 bp, Cypridinia luciferase; identical to SEQ ID NO: 794

SEQ ID NO: 808 - DNA, 39 bp, Cypridinia luciferase; identical to SEQ ID NO: 794

SEQ ID NO: 809 - DNA, 39 bp, Cypridinia luciferase; identical to SEQ ID NO: 794

SEQ ID NO: 810 - DNA, 38 bp, Cypridinia luciferase
tatgtaattgaatgcagagtagaggcatggtttagaac

SEQ ID NO: 811 - DNA, 39 bp, Cypridinia luciferase
tatgtaattgaatgcagagtagaggccatagtttagaac

SEQ ID NO: 812 - DNA, 39 bp, Cypridinia luciferase
tatgtaattgaatgcagagtagaggccatgctttagaac

SEQ ID NO: 813 - DNA, 38 bp, Cypridinia luciferase
tatgtaattgaatgcagagtagaggcctagtttagaac

SEQ ID NO: 814 - DNA, 38 bp, Cypridinia luciferase
tatgtaattgaatgcagagtagaggcctggtttagaac

SEQ ID NO: 815 - DNA, 38 bp, Cypridinia luciferase
tagtaattgaatgcagagtagaggccgcagtttagaac

SEQ ID NO: 816 - DNA, 39 bp, Cypridinia luciferase
tatgtaattgaatgcagagtagaggccgcaggttagaac

SEQ ID NO: 817 - DNA, 39 bp, Cypridinia luciferase; identical to SEQ ID NO: 816

SEQ ID NO: 818 - DNA, 37 bp, Cypridinia luciferase
taattgaatgcagagtagaggccgcaggatggtttag

SEQ ID NO: 819 - DNA, 37 bp, Cypridinia luciferase
attgaatgcagagtagaggccgcaggatggtttagaa

SEQ ID NO: 820 - RNA, 104 nt, Cypridinia luciferase
uguugccgaaugugucaguauguaauugaaugcagaguagaggccgcaggauaguuuagaacauucuauggaaagagauuccaguuccaggaaccugguacaua

SEQ ID NO: 821 - RNA, 50 nt, Cypridinia luciferase
cauccugcggccucuacucugcauucaauuacauacugacacauucggca

SEQ ID NO: 822 - RNA, 50 nt, Cypridinia luciferase
uucuaaaccauccugcggccucuacucugcauucaauuacauacugacac

SEQ ID NO: 823 - RNA, 50 nt, Cypridinia luciferase
auagaauguucuaaaccauccugcggccucuacucugcauucaauuacau

SEQ ID NO: 824 - RNA, 50 nt, Cypridinia luciferase
cucuuuccauagaauguucuaaaccauccugcggccucuacucugcauuc

SEQ ID NO: 825 - RNA, 50 nt, Cypridinia luciferase
acuggaaucucuuuccauagaauguucuaaaccauccugcggccucuacu

SEQ ID NO: 826 - RNA, 50 nt, Cypridinia luciferase
uuccuggaacuggaaucucuuuccauagaauguucuaaaccauccugcgg

SEQ ID NO: 827 - RNA, 50 nt, Cypridinia luciferase
guaccagguuccuggaacuggaaucucuuuccauagaauguucuaaacca

SEQ ID NO: 828 - RNA, 56 nt, Cypridinia luciferase; identical to SEQ ID NO: 754

SEQ ID NO: 829 - RNA, 50 nt, Cypridinia luciferase
  misc_feature (17)..(17): N = a, g, c, or u
auagaauguucuaaacnauccugcggccucaucucugcauucaauuacau

SEQ ID NO: 830 - protein, 7 aa, Artificial Sequence
  Synthetic peptide
GSGGGGS

SEQ ID NO: 831 - protein, 15 aa, Artificial Sequence
  Synthetic peptide
GGGGSGGGGSGGGGS

SEQ ID NO: 832 - protein, 5 aa, Artificial Sequence
  Synthetic peptide
EAAAK

SEQ ID NO: 833 - protein, 18 aa, Artificial Sequence
  Synthetic peptide
GGSGGSGGSGGSGGSGGS

SEQ ID NO: 834 - protein, 16 aa, Artificial Sequence
  Synthetic peptide
SGSETPGTSESATPES
